United States Patent Application Publication US 2019/0002960 A1 - sequence listing, part 14

SEQ ID NO: 14 - DNA, 2756919 bp, Staphylococcus aureus subsp. aureus 55/2053 (residues 1-1,378,460 of 2,756,919)
actactgctcaatttttttacttttatcgattaaagatagaaatacacgatgcgagcaatcaaatttcataacatcaccatgagtttgatccaaagcatgagtgtttacaatgtttgaataccttatacagttcttatacatactttataaattatttcccaagctgttttgatacacacactaacagatactctatagaaggaaaagttatccacttatgcacacttatactttttagaattgtggataattagaaattacacacaaagttatactatttttagcaacatattcacaggtatttgacatatagagaactgaaaaagtataattgtgtggataagtcgtccaactcatgattttataaggatttatttattgatatttacataaaaatactgtgcataactaataagcaggataaagttatccaccgattgttattaacttgtggataattattaacatggtgtgtttagaagttatccacggttgttatttttgtgtataacttaaaaatttaagaaagatggagtaaatttatgtcggaaaaagaaatttgggaaaaagtgcttgaaattgctcaagaaaaattatcagctgtaagttactcaactttcctaaaagatactgagctttacacgatcaaagatggtgaagctatcgtattatcgagtattccttttaatgcaaattggttaaatcaacaatatgctgaaattatccaagcaatcttatttgatgttgtaggctatgaagtaaaacctcactttattactactgaagaattagcaaattatagtaataatgaaactgctactccaaaagaagcaacaaaaccttctactgaaacaactgaggataatcatgtgcttggtagagagcaattcaatgcccataacacatttgacacttttgtaatcggacctggtaaccgcttcccacatgcagcgagtttagctgtggccgaagcaccagccaaagcgtacaatccattatttatctatggaggtgttggtttaggaaaaacccatttaatgcatgccattggtcatcatgttttagataataatccagatgccaaagtgatttacacatcaagtgaaaaattcacaaatgaatttattaaatcaattcgtgataacgaaggtgaagctttcagagaaagatatcgtaatatcgacgtcttattaatcgatgatattcagttcatacaaaataaagtacaaacacaagaagaatttttctatacttttaatgaattgcatcagaataacaagcaaatagttatttcgagtgatcgaccgccaaaggaaattgcacaattagaagatcgattacgttcgcgctttgaatgggggctaattgttgatattacgccaccagattatgaaactcgaatggcaattttgcagaagaaaattgaagaagaaaaattagatattccaccagaagctttaaattatatagcaaatcaaattcaatctaatattcgtgaattagaaggtgcattaacacgtttacttgcatattcacaattattaggaaaaccaattacaactgaattaactgctgaagctttaaaagatatcattcaagcaccaaaatctaaaaagattaccatccaagatattcaaaaaattgtaggccagtactataatgttagaattgaagatttcagtgcaaaaaaacgtacaaagtcaattgcatatccacgtcaaatagctatgtacttgtctagagagcttacagatttctcattacctaaaattggtgaagaatttggtgggcgtgatcatacgaccgtcattcatgctcatgaaaaaatatctaaagatttaaaagaagatcctatttttaaacaagaagtagagaatcttgaaaaagaaataagaaatgtataagtaggaaactttgggaaatgtaatctgttatataacagtactaataataacaatcattttttacatttctatatgctaatgtggcaagatgagcaaaactcattttgtggataatgtttaaaagtcatacacgccatacacaagttatcaacatgtgtataacttcgccaaatctatgtttttaagacttatccaccaatccacagcacctactactattactaagaacttaaaacctatataattatatataaacgactggaaggagttttaattaatgatggaattcactattaaaagagattattttattacacaattaaatgacacattaaaagctatttcaccaagaacaacattacctatattaactggtatcaaaatcgatgcaaaagaacatgaagttatattaactggttcagactctgaaatttcaatagaaatcactattcctaaaactgtagatggcgaagatattgtcaatatttcagaaacaggctcagtagtacttcctggacgattctttgttgatattataaaaaaattacctggtaaagatgttaaattatctacaaatgaacaattccagacattaattacatcaggtcattctgaatttaatttaagtggcttagatccagatcaatatcctttattacctcaagtttctagagatgacgcaattcaattgtcggtaaaagtgcttaaaaacgtaattgcacaaacgaattttgcagtgtccacctcagaaacacgcccagtactaactggtgtgaactggcttatacaagaaaatgaattaatatgcacagcgactgactcacaccgcttggctgtaagaaagttgcagttagaagatgtttctgaaaacaaaaatgtcatcattccaggtaaggctttagctgaattaaataaaattatgtctgacaatgaagaagacattgatatcttctttgcttcaaaccaagttttatttaaagttggaaatgtgaactttatttctcgattattagaaggacattatcctgatacaacacgtttattccctgaaaactatgaaattaaattaagtatagacaatggggagttttatcatgcgattgatcgtgcatctttattagcacgtgaaggtggtaataacgttattaaattaagtacaggtgatgacgttgttgaattgtcttctacatcaccagaaattggtactgtaaaagaagaagttgatgcaaacgatgttgaaggtggtagcctgaaaatttcattcaactctaaatatatgatggatgctttaaaagcaatcgataatgatgaggttgaagttgaattcttcggtacaatgaaaccatttattctaaaaccaaaaggtgacgactcggtaacgcaattaattttaccaatcagaacttactaaaaataaatataaataaaggatgacgtgattaattaaaacgtcatcctttattttttggcaaaaataattctagattcgtatgtaaaataaatttgacagcattttaaacagcaaataaaagacgccaattaaatttatgacaaatgtatccagaatttaataagtgtgcttatatgccctttaaattcaaaattttaatagtcaataacaagttgaatataaaagttaaacgccgttaaatagcgttaaaaaattgaaaatgacagtattgccaaaaaataagaattaattatttatatgtaaacggtttccacctctattttaaatgaaatttgtgacaaaaaaaggtataatatattaatgacatacaaagaaatggagtgattattttggttcaagaagttgtagtagaaggagacattaatttaggtcaatttctaaaaacagaagggattattgaatctggtggtcaagcaaaatggttcttgcaagacgttgaagtattaattaatggagtgcgtgaaacacgtcgcggtaaaaagttagaacatcaagatcgtatagatatcccagaattacctgaagatgctggttctttcttaatcattcatcaaggtgaacaatgaagttaaatacactccaattagaaaattatcgtaactatgatgaggttacgttgaaatgtcatcctgacgtgaatatcctcattggagaaaatgcacaaggaaagacaaatttacttgaatcaatttataccttagctttagcaaaaagtcatagaacgagtaatgataaggaactcatacgttttaatgctgattatgctaaaatagaaggtgagcttagttatagacacggcacgatgccattaacaatgtttataactaaaaaaggtaaacaagtcaaagtgaatcacttagagcaaagtcgtctaactcaatatattggacacctcaatgtggttctatttgcgccagaagatttgaatattgtaaaaggctctcctcaaataagacgacgctttatagatatggagttgggccaaatttctgctgtttacttaaatgatttagctcaataccaacgtattttaaagcaaaagaataattacttaaagcagttacaattaggccaaaaaaaggacttaacaatgttggaagtattaaatcaacagtttgctgaatatgcaatgaaagtaactgataaacgtgcacattttattcaagagctagagtcgttagctaaaccgattcatgctggtatcacaaatgataaagaagcgttgtcgctgaattatttacctagtcttaaatttgattatgctcaaaatgaagcggcacgacttgaagaaattatgtctattcttagcgataatatgcaaagagaaaaagaacgaggcattagcttattcggaccacatcgagatgatataagttttgatgtgaatggcatggatgctcaaacatatggttctcaaggacagcaacgtacaacggctttgtccattaaattagctgaaattgagttaatgaatatcgaagttggggaatatcccatcttattattagacgatgtactcagtgaattagatgattcgcgtcaaacgcatttattaagtacgattcagcataaagtacaaacatttgtcactacgacatctgtagatggtattgatcatgaaatcatgaataacgctaaattgtatcgtattaatcaaggtgaaattataaagtaacagaaagcgatggtgactgcattgtcagatgtaaacaacacggataattatggtgctgggcaaatacaagtattagaaggtttagaagcagtacgtaaaagaccaggtatgtatataggatcgacttcagagagaggtttgcaccatttagtgtgggaaattgtcgataatagtatcgatgaagcattagctggttatgcaaatcaaattgaagttgttattgaaaaagataactggattaaagtaacggataacggacgtggtatcccagttgatattcaagaaaaaatgggacgtccagctgtcgaagttattttaactgttttacatgctggtggtaaattcggcggtggcggatacaaagtatctggtggtttacatggtgttggttcatcagttgtaaacgcattgtcacaagacttagaagtatatgtacacagaaatgagactatatatcatcaagcatataaaaaaggtgtacctcaatttgacttaaaagaagttggcacaactgataagacaggtactgtcattcgttttaaagcagatggagaaatcttcacagagacaactgtatacaactatgaaacattacagcaacgtattagagagcttgctttcttaaacaaaggaattcaaatcacattaagagatgaacgtgatgaagaaaacgttagagaagactcctatcactatgagggcggtattaaatcttatgttgagttattgaacgaaaataaagaacctattcatgatgagccgatttatattcatcaatctaaagatgatattgaagtagaaattgcgattcaatataactcaggatatgccacaaatcttttaacttacgcaaataacattcatacgtacgaaggtggtacgcatgaagacggattcaaacgtgcattaacgcgtgtcttaaatagttatggtttaagtagcaagattatgaaagaagacaaagatagactttctggtgaagatacacgtgaaggtatgacagcaattatatctatcaaacatggtgatcctcaattcgaaggtcaaacgaagacaaaattaggtaattctgaagtgcgtcaagttgtagataaattattctcagagcactttgaacgatttttatatgaaaatccacaagtcgcacgtacagtggttgaaaaaggtattatggcggcacgtgcacgtgttgctgcgaaaaaagcgcgtgaagtaacacgtcgtaaatcagcgttagatgtagcaagtcttccaggtaaattagccgattgctctagtaaaagtcctgaagaatgtgagattttcttagtcgaaggggactctgccggggggtctacaaaatctggtcgtgactctagaacgcaggcgattttaccattacgaggtaagatattaaatgttgaaaaggcacgattagatagaattttgaataacaatgaaattcgtcaaatgatcacagcatttggtacaggaatcggtggcgactttgatctagcgaaagcaagatatcacaaaatcgtcattatgactgatgccgatgtggatggagcgcatattagaacattgttattaacattcttctatcgatttatgagaccgttaattgaagcaggctatgtgtatattgcacagccaccgttgtataaactgacacaaggtaaacaaaagtattatgtatacaatgatagggaacttgataaacttaaatctgaattgaatccaacaccaaaatggtctattgcacgatacaaaggtcttggagaaatgaatgcagatcaattatgggaaacaacaatgaaccctgagcaccgcgctcttttacaagtaaaacttgaagatgcgattgaagcggaccaaacatttgaaatgttaatgggtgacgttgtagaaaaccgtagacaatttatagaagataatgcagtttatgcaaacttagacttctaagcgctgtgaactgaacttttgaaggaggaactcttgatggctgaattacctcaatcaagaataaatgaacgaaatattaccagtgaaatgcgtgaatcatttttagattatgcgatgagtgttatcgttgctcgtgcattgccagatgttcgtgacggtttaaaaccagtacatcgtcgtatactatatggattaaatgaacaaggtatgacaccggataaatcatataaaaaatcagcacgtatcgttggtgacgtaatgggtaaatatcaccctcatggtgactcatctatctatgaagcaatggtacgtatggctcaagatttcagttatcgttatccgcttgttgatggccaaggtaactttggttcaatggatggagatggcgcagcagcaatgcgttatactgaagcacgtatgactaaaatcacacttgaactgttacgtgatattaataaagatacaatagattttatcgataactatgatggtaatgaaagagagccgtcagtcttacctgctcgattccctaacttgttagccaatggtgcatcaggtatcgcggtaggtatggcaacgaatattccaccacataacttaacagaattgatcaatggtgtacttagcttaagtaagaatcctgatatttcaattgctgagttaatggaagatattgaaggtcctgatttcccaactgctggacttattttaggtaagagtggtattagacgcgcatatgaaacaggtcgtggttcaattcaaatgcgttctcgtgcagttattgaagaacgtggaggcggacgtcaacgtattgttgtcactgaaattcctttccaagtgaataaggctcgtatgattgaaaaaattgcagagcttgttcgtgacaagaaaattgacggtattactgatttacgtgatgaaacaagtttacgtactggtgtgcgtgtcgttattgatgtgcgtaaggatgccaatgctagtgtcattttaaataacttatacaaacaaacacctcttcaaacatcatttggtgtgaatatgattgctctagtgaatggtagaccgaagctgattaatttaaaagaagcgttagtacattatttagagcatcaaaagacagttgttagaagacgtacgcaatacaacttacgtaaagctaaagatcgtgcccacattttagaagggttacgtattgcgttagatcatatcgatgaaattatttcaacgattcgtgaatcagaaacagataaagtcgcaatggaaagtttgcaacaacgcttcaaactttctgaaaaacaagctcaagctattttagacatgcgtttaagacgtctaacaggtttagagagagacaaaattgaagctgaatataatgagttattaaattatattagtgaattagaagcaatcttagctgatgaagaagtgttattacagttagttagagatgaattgactgaaattagagatcgcttcggtgatgatcgtcgtactgaaattcaattaggtggatttgaagacttagaggacgaggacttaattccagaagaacaaattgtaattactttgagccataataactatattaaacgtttgccggtatctacatatcgtgctcaaaaccgtggtggtcgtggtgttcaaggtatgaatacattggaagaagattttgtcagtcaattggtaactttaagtacacatgaccatgtattgttctttactaacaaaggtcgtgtatacaaactaaaaggttatgaagtgcctgagttatcaagacagtctaaaggtattcctgtagtgaatgctattgaacttgaaaatgatgaaatcattagtacaatgattgctgttaaagaccttgaaagtgaagataacttcttagtgtttgcaactaaacgtggtgtcgttaaacgttcagcattaagtaacttctcaagaataaatagaaatggtaagattgcgatttcgttcagagaagatgatgagttaattgcagttcgcttaacaagtggtcaagaagatatcttgattggtacatcacatgcatcattaattcgattccctgaatcaacattacgtcctttaggccgtacagcaacgggtgtgaaaggtattacacttcgtgaaggtgacgaagttgtagggcttgatgtagctcatgcaaacagtgttgatgaagtattagtagttactgaaaatggttatggtaaacgtacgccagttaatgactatcgtttatcaaatcgtggtggtaaaggtattaaaacagctacgattactgagcgtaatggtaatgttgtatgtatcactacagtaactggtgaagaagatttaatgattgttactaatgcaggtgtcattattcgactagatgttgcagatatttctcaaaatggtcgtgcagcacaaggtgttcgcttaattcgcttaggcgatgatcaatttgtttcaacggttgctaaagtaaaagaggatgcagacgaagaaaatgaagatgaacaatctactgtatctgaagatggtactgaacaacaacgtgaagcggttgtaaatgatgaaacaccaggaaatgcaattcatactgaagtgattgattcagaagtaaatgatgaagatggacgtattgaagtaagacaagatttcatggaccgtgttgaagaagacatacaacaatcatcagatgatgatgaagaataataaaaaaataagacttccctatatgtaggggggtcttatttttatgctagaaagtaatgctatactatattcaatgattagtaatgactaactttctaattgtttcattgcgtaaggtatttcattgataagtcttgatggtggcaccacatacatatcttttgcaagattttcgccaataaaactatgtgtatatgtggcactcataaccgcttcttttaagttatcaaattgaccaacaaaacttgtaatcataccagcaagtgtatcgcccataccaccagtcgccattgctgggctaccgattgtcaatttaaagtcttcatctttaaagaaaatttcagtaccgtgttttttaagtacaacagttgcgcctaaacgatcaactgcttcacgattacgctcatatgtctgttcctcaataggaataccacttaatcgttcccattctttgagatgcggagtaaaaatcacgcgacatgtaggtaattgtggtttcaatttactaaagattgtgatggcatcgccgtctacgattaaattttgatgcggttgtatattttgtagtaggaatgtaatggcattatttcctttgaaatcaacgccaagacctggaccaattagtatactgtcagtcatttcaatcattttcgtcaacattttcgtatcattaatatcaataaccatcgcttctgggcaacgagaatgtaatgctgaatgatttgttggatgtgtagctacagtgattaaaccactaccgctaaatacacatgcacgagccgctaacataatggcaccacctaagttagcagatccaccaattaataaaattttgccataatcacctttatgtgaatcttctttacgcttaggaatgttaatagaatttaacgtttccatagtgatataacctcccatgtaaaagccttttccgaatttattcaattttaaaaatatatagtaacttttaacaaaatgtattataaatttctgaattcattattatttgtcgttaaatacaatagaaaatactatacctgtatatgcaattcgtcaatagataaattattaaatatgcttacaacaatcttaatatcctttaacgcactacaatagtgctctgataataggttataaatgtacgtaaaaccattgtttcaataaaaatgaaaacgtatacttcaagaaggatgggttacttaatataaacaagggggtaacatatatgactttatatttagatggtgaaacactaacaattgagtatattaaatcatttttacaacaacaatcaaagattgaaattattgatgatgcgttagaacgtgtcaaaaaaagtagagcagtagttgaacgtattattgaaaatgaggaaacggtttacggtatcactacaggttttgggttatttagtgatgtacgtatagacccgacgcaatataacgaattacaaatgaatctgatacgctcacatgcctgtggactaggtgagccattttcaaaagaagtagcattagtcatgatgattttacgattgaatacattattaaaaggtcattcaggtgccactttagaattagtgagacaattacaattttttataaatgaacgtattataccgataatcccacagcaaggctctctcggtgcatcaggagatttagcgccattatcacatttagcattagcattaattggtgaagggaaagtattgtacagaggtgaagaaaaggatagtgacgatgtattaagagaattaaatagacaacctttgaaccttcaggctaaagaaggtttagcattgattaatggtacgcaagctatgacagctcaaggtgtcattagttatatagaagcagaagatttaggttaccaatctgaatggattgctgcattaacgcatcagtctcttaatggcattatagatgcatatcgacatgatgtgcacgctgttcgtaattttcaagaacagattaatgtggcagcgcgtatgcgtgattggttagaaggatcaacattaacgacgcgacaagcagaaatacgtgtacaagatgcatatacattgcgttgtataccacaaatccatggcgcgagttttcaagtattcaattatgttaaacagcaattagaatttgaaatgaatgcggctaatgataatccacttatatttgaggaagcaaatgcaacgtttgttatttcgggtggtaacttccatggacaacctattgcttttgcattagatcatcttaaattaggtgtaagtgaattagcaaacgtatcggaacgtcgtctagagcgactagtaaatcctcaattaaatggtgatttaccagcatttcttagtccagagccaggattgcaaagtggcgcgatgattatgcaatatgctgctgcaagtctcgtttctgaaaataaaactttagcgcatccagcgagtgttgattctatcacttcatctgcgaaccaagaagatcacgtatctatgggaactacagctgctagacatggttatcaaattattgaaaatgcaagacgtgtgttggcaatcgaatgtgttattgcattacaagcagcagagttgaaaggtgtcgaaggattatcaccaaaaacacgtcgcaagtatgatgagtttcgaagtatcgtgccatccattacatatgaccgtcaatttcataaagatattgaagcggttgcacagtatttaaagcaatcaatttatcaaacgactgcatgtcactaaatcgacatgattgatgtttgaaatcgttacttgaaaaagcaaatatagtttgctatattaaaaataacttaataagacattgttcgtaggacaagtaatatatagtgttcgatatcagagagcttgtggttagtgtgaacaagaatcaacatatatatgaatctacctacttatttaaaagaacaatcggtgataaccgttattttagtgaagtgcaatttaggtttagtgtatctttataacttaaattgttaaatagggtggcaacgcgtagaccacgtcccttgtagggatgtggtctttttttattttctaaaaaataaagacgtgcgtcattccataataaatgataattatttgggaaaggatgaaggttaatgttagacattagattattcagaaatgagcctgacacagttaagagcaaaattgaattacgcggagatgatccaaaagttgtagatgaaattttagaattggatgagcaacgacgtaaattaattagtgcaacagaagaaatgaaagcacgtcgtaataaagtaagcgaagaaatcgcattaaaaaaacgtaataaagaaaatgctgatgatgtgattgctgaaatgcgcacattaggtgacgatattaaagaaaaagatagtcaattaaatgaaattgatagtaaaatgacaggtatcctttgtcgtattccaaatttaataagtgatgatgtacctcaaggtgaatctgatgaagataacgttgaagttaaaaagtggggtacaccacgtgagttttcatttgaaccaaaagcacattgggatattgtagaagaattgaaaatggctgattttgatcgtgcagcaaaagtttcaggtgcgcgttttgtatatttaacaaatgaaggtgcgcaattagagcgtgctttaatgaactatatgattacaaaacatacaacacaacatggttatacagaaatgatggtaccacagcttgtaaacgcagatacaatgtatggtacaggtcaattacctaaatttgaagaagatttatttaaagtagaaaaagaaggattatatacaattccaactgctgaagtaccattaacgaatttctatcgtaatgaaattattcaaccaggtgtacttcctgaaaaattcactggtcaatctgcatgtttccgtagtgaagcaggatcagcaggtagagatacaagaggattaattcgtttacatcaattcgataaagtggaaatggtacgttttgaacaacctgaagattcatggaatgctttagaagaaatgacaacaaacgcagaagcaattttagaagagttaggtttaccataccgtcgtgttattttatgtacaggtgatattggatttagtgcaagcaaaacatatgatttagaagtttggttaccaagctacaatgattataaagaaattagttcatgctcaaactgtacggatttccaagcgcgtcgtgctaacatccgcttcaagcgtgacaaagcagctaaaccagaattagcacatacattaaatggtagtggtttagcagttggacgtacatttgctgctattgttgaaaattaccaaaatgaagatggaacagtaacaattccagaagcattagtaccatttatgggtggtaaaacacaaatttcaaaaccagttaaataaagactttagctacaagctttaaaaagtatatatctacgtatacttaaagcaaggccaagatactttaaataatattttaaaaagtggtgacgaagctgtcgccactttttttgtgctgtaaaagtataatagtgagccaatgcacataacaacaataaattaagtttgttgtttaatggggtgaacgcatttcattatagcaacaatacgggataattatgatgaactaaaacaatctaaaacgtaacaattttgagcatcactattatgggaaattaagtgataaaaaactgatttcgttgatgtagtatgagtaatatcgatgcagtagggtaggggggattatcgaaagtgttagagacatgaatcaatatcccagactcatcattagatataaaaaattataaaattagtacttaaaaacaactacaaacccgtagaaaatatggaggtagtattaaataaaatattgaaaattctcaaaactaaaaagctgatatgaagccgattaaagactccggtatgtctaacctcagacaaaccggagtctaacgttattgcttgtcatatagaactatattagactaggtatattattttttcgtaattatataaatataaagtgaaaaaggaggtaattgagatgacaacacatttgagttttagacaaggcgtgcaagagtgtatcccaacattattgggttatgccggtgttggtatttcatttggtatcgtggcttcatctcaaaactttagtattttagaaattatcttgttatgtcttgttatatatgccggtgctgcgcaatttattatgtgcgcgttgtttatagcaggtacaccgatatcagcgattgtactaactgtatttatcgtaaattcaagaatgttccttttaagtatgtcgcttgcaccaaacttcaagacatatgggttttggaaccgtgttggattaggttcattagtaactgacgaaacgtttggtgtcgccattacaccttatttaaaaggagaagctatcaatgatcgttggatgcatggtcttaatattacagcatatttattttgggtaattccatgtgtagcaggtgcattgtttggcgagtatatttcgaatccacaagcattaggattagattttgctatcacggctatgtttatctttttagccattgcacaatttgaatcaattactaaatcgcgtttaagaatttacatagtactcattattgccgtcatagtaatgatgttatcgctaagtatgtttatgccttcatatctagcaatattaattgcagccacaatttcagcagcgttaggagtgatgatggaacgatgataactcatatgaacatgttaatacttattttattgtgtggaatcgtaacgctattaattcgaattataccttttatcatgatttcaaaagtgcaattgcctgatgtcgtggttcgatggctatcatttatcccaatcacactatttacggcacttgtcattgacagcattattcaacagacgcctcatggtgaggggtatacattaaacatcccttacattatcgcgctcattccgacggttattttatctataatcacgcgtagtttaactattacaattattagtgggattgttatcatggcagcattacgatttttcttttaaaaataactgaaaatcattgaacagatatttaaacttaggtaaactgttagtaatcagaaaattctgatatacaaatcatctatgttaagattgggaatcgtgtatacgtaagcgatttggctaacgcatgacaatgataacaacattttaaatgataaaagtaattcatcactgaatctcaactaacacataacaatttcatatttcttattgtgagaagttgagggacttggccctgtgatacttcagcaaccgactttatagcacggtgctaaaaccaacgagttactcgaatgataagtataaagacttcttacttttcaatagggtgagaagttttttgtttaaggaggaaagaacaatgacaaattacacagtagatactttaaatttaggggaatttataacagaatctggggaagtcatagataacttgcgtttgagatatgagcatgtcggttatcatggacaaccattagttgtagtttgtcatgcattaactggcaatcatttaacatatggaacagatgattatccggggtggtggcgagaaattattgatgggggatatgtgcctattcatgactatcaatttttaacatttgatgttattggtagtcctttcggttcaagttcacctttaaacgaccctcattttcctaaaaaattaacattaagagatattgttagagcgaatgaacgaggtatacaagcgcttggttatgacaaaattaatattttaatagggggaagtcttggaggtatgcaagcaatggaactactttacaatcgacagtttgaagtagataaagccattattcttgctgcaacaagtcgaacatcatcttatagtagagctttcaatgaaattgcgcgtcaggccattcatcttggtggtaaggaaggtctaagtattgcacgccaattaggttttttgacatatcgatcatcgaaaagttatgatgaacgtttcacaccggatgaagtagtcgcataccagcaacatcaaggtaataaatttaaagaacgattcgatttgaattgttatctgacactgctagatgtattggatagtcacaacattgaccgaggtcgcacagacgtaacgcatgtttttaaaaatttagaaacgaaagtcttaacaatgggctttatagatgatttgctatatccggatgatcaagttcgtgctttaggtgaacgttttaaatatcatcgtcatttctttgtacctgataacgttgggcatgatggattcctactaaactttagtacctgggcacctaacttatatcatttcttaaatttaaagcattttaagcgcaagtaataatgtatatattttcaaagaatgaagccactaaatcacagttatcatattcaaaaacatctagagtacatgagagtggaaatgaattgtaaatctaaatcaagcttgattgctatgtagtgggattaaataatcatgttgaaaatgaaagcacacaaaagcgatttaaatgagtatgttaattacttataaaacatgaaagttattattcaattaaatgaaatagaagcatacaatctataaattgttaatttccattaaagaggttaaaataatagctatagttaaaaatatgggagtggcttatgtgttttcaaaaatacaacctaaagcaacaatgattgcaacgattacgttggtatttgtcgctttagctttatatctagtgcctggtttaggactaatatttgcattatttgcaaccataccaggtatcgttttatggaataaatcaatacaatctttcgggattagtgcacttattacagtaattataacaactgttttaggtaatactttcgttttaagtgctatcatattagtcttaattgcaagtttaattattggtcaattgctcaaagaaagaacgtctaaagaaagaatattatacgtaacaaccgtagcgatgagcttaatttcattaatcgcctttatgttactacaaacattcggaagaattccaccatcagcgagcatagtaaaacctttcaagcaaacattacatgaagcgattacgatgagcggtgccgatgcgaatatgacccaaatattagaagaagggtttagacaagcgaccgttcaattaccaggtttcatcattatcattacatttttaatcgtcttaattaacttaatcgttacatttccgattttacgaaaatttaaaatcgctacacctgtatttaagccacttttcgcgtggcaaatgagcggtattttattatggatatacattattgttatcatatgtttattatttacaggtcaaccgagtgtgttccagagcattcttttaaatttccaacttgtgttatcattagtgatgtatattcaaggtttaagtgttattcatttctttggtaaagcgaaaggtttgccgaatgcagtaacgattttactattggttatcggtacaatactgacacctacgacgcatattgtaggactacttggtgttatcgatttaagtttgaatttgaagcgaatcatgaaaaataattctaaaaagtgaatagaggtggaataatgaatcggcagtccactaagaaagctttactaataccatttgtcatcatgatcatcacagcaattgttttaatgggtgtatggtttatctttaatagccttatagcattaattgcatctatcgttcttgtcgtgatgattattgttagcatcgttttattcagacaagctttaatgaaaatggatagttatgtagatggtttgagtgctcaaatttcaacaacaaataataaagcaatcaaacatttaccaattggtatcattgttttagatgaaaatgatcacatcgaatgggttaaccaatttatgacagatcatatggaagcaaatgtcatttctgaatctgtaaatgaagtatttccaaacattttaaagcaattagatagagtgaaatccgttgaaatagaatataatcagtatcatttccaagtacgttattctgagaatgatcactgcctctatttctttgatataactgaacaagtacaaacaaatgaactatatgaaaattctaaaccaatcattgcgacattatttttagacaactacgatgagattacgcaaaatatgaatgatacgcagcgttcggagatcaattcaatggtaacgcgtgtcattagtcgatgggcaactgagtataatatattctttaaaaggtatagttccgatcaattcgtagcctatttaaatcaaaaaatattagctgacttagaagaatctaaatttgatatcttgagtcaattacgtgaaaaaagtgttggttatcgtgcccaattaacattaagtatcggtgttggtgaaggcactgaaaatttaatcgacttaggtgaattatcacaatcaggcctagacttagcattaggacgtggtggtgaccaagttgcaattaaaagtattaatggtaatgtgcgcttctatggcggtaagactgacccgatggagaaacgtactcgtgtaagagcacgtgttatctcacatgcgttaaaagacatccttgcagagggtgacaaagtcattatcatgggacataaacgtcctgacttagatgcaattggtgcagcaatcggtgtgtctagatttgcaatgatgaataatttagaagcatacatcgtattaaatgagactgacattgatccaacattacgacgcgtgatgaacgaaattgataaaaagccagagttaagagagcgatttattacatcagatgatgcttgggatatgatgacatctaagacaaccgtagtgattgttgatacgcataaaccggaactggttttagatgaaaatgtcttaaataaagcaaaccgtaaagttgttatcgatcatcatagacgtggtgaaagcttcatctctaatccattgttgatatatatggaaccatacgcaagttcaacagcagaacttgtaacagaattactggaatatcaaccaacagaacaacgtttaacgcgtcttgaatcaacagtgatgtatgcaggtattattgtagatacaagaaactttacattacgaacaggatcaagaacattcgatgcagcgagttatttacgtgcacatggtgcagatacgattttaacgcaacatttcttaaaagatgatgtggatacttacattaatcgatctgaattaattcgaactgtaaaagttgaagataatggcatagccattgcgcatggttcagacgataaaatttatcatccagtaacagttgcacaagcagcagatgaactgttaagtttagaaggtattgaagcatcatatgttgttgcgagacgtgaagataatctgattggtatatctgcgcgttcactcggttcagtaaatgtccagttaacaatggaagcacttggtggcggtggacatttaaccaatgctgcaacacaacttaaaggtgtgacagtcgaagaggcgatagcacaattacaacaagcaattacagaacaattaagtaggagtgaagatgcatgaaagtaatttttacacaagatgttaaaggtaaaggtaaaaaaggtgaagttaaagaagtaccagtaggttatgcaaataacttcttattgaaaaagaattatgctgtagaagcaacaccaggtaacctgaaacaattagagttacagaaaaaacgtgcaaaacaagaacgccaacaagaaattgaagatgctaaagcattaaaagaaactttatcaaacattgaagttgaagtatcagcaaaaactggtgaaggtggtaaattgtttggatcagtaagcacaaaacaaattgccgaagcactaaaagcacaacatgatattaaaattgataaacgtaaaatggatttaccaaatggaattcattccctaggatatacgaatgtacctgttaaattagataaagaagttgaaggtacaattcgcgtacacacagttgaacaataaagttggattgaaataagaggtgtaaccattcatggatagaatgtatgagcaaaatcaaatgccacataacaatgaagctgaacagtctgtcttaggttcaattattatagatccagaattgattaatactactcaggaagtgttgcttcctgagtcattttataggggtgcccatcaacatattttccgtgcaatgatgcacttaaatgaagataataaagaaattgatgttgtaacattgatggatcaattatcgacggaaggtacgttgaatgaagcgggtggcccgcaatatcttgcagagttatctacaaatgtaccaacgacgcgaaatgttcagtattatactgatatcgtttctaagcatgcattaaaacgtagattaattcaaactgcagatagtattgccaatgatggatataatgatgaacttgaactagatgcgattttaagtgatgcagaacgtcgaattttagagctatcatcttctcgtgaaagcgatggctttaaagacattcgagacgtcttaggacaagtatatgaaacagctgaagagcttgatcaaaatagtggtcaaacaccaggtattcctacaggatatcgagatttagaccaaatgacagcagggttcaaccgaaatgatttaattatccttgcagcgcgtccatctgtaggtaagactgcgttcgcacttaatattgcacaaaaagttgcaacgcatgaagatatgtatacagttggtattttctcactagagatgggtgctgatcagttagccacacgtatgatttgtagttctggtaatgttgactcaaaccgcttaagaaccggtactatgactgagaaagattggagtcgttttactatagcggtaggtaaattatcacgtacgaagatttttattgatgatacaccgggtattcgaattaatgatctacgttctaaatgtcgtcgattaaagcaagaacatggcttagacatgattgtgattgactacttacagttgattcaaggtagtggttcacgtgcgtctgataacagacaacaggaagtttctgaaatctctcgtacattaaaagcattagcccgtgaattagaatgtccagttatcgcattaagtcagttatctcgtggtgttgaacaacgacaagataaacgtccaatgatgagtgatattcgtgaatctggttcgattgagcaagatgccgatatcgttgcattcttataccgtgatgattactataaccgtggtggcgatgaagatgatgacgatgatggtggtttcgagccgcaaacgaatgatgaaaacggcgaaattgaaatcatcattgctaagcaacgtaatggtccaacaggcacagttaagttacactttatgaaacaatataataaatttacagatatcgattatgcacatgctgatatgatgtaaaaaaagtttttccgtacaataatcattttagtgataaaattgtacggtttttattttgttctgaacgggttgatatatgttaagtttgtgtattggaagtgatgaattagtgctgtcaaagactctgttaaagggttttgaggacgttgaagacgatttgttaaaatgatttttcttttaaaaaggctgaaaatcaatgttcgatttttatttgcattatggtctcgatattggtagaatatcaaatggttaaatgagaaaaacttggaggtgctcacatgtcatcaatcgtagtagttgggacacaatggggagacgaaggaaaaggaaaaataacggatttcttggcagaacagtcagatgttatcgcgcgtttttcaggtggtaataatgcaggccataccattcaatttggcggagaaacatataaattacatttagtaccatctggtatcttttacaaagacaaattagcggtaatcggtaacggagtcgttgttgatccagttgcactattgaaagaattagacggattaaatgaacgtggcattcctacaagtaatttacgtatatctaatcgtgcgcaagtgattttaccatatcacttagcacaagatgaatatgaagaacgtttacgcggtgataataagattggtacaactaaaaaaggtatcggtccagcatatgtagacaaagttcaacgtatcggtattcgtatggcagatttacttgaaaaagaaacattcgaaagattattaaaatcaaacattgaatataaacaagcatatttcaaaggcatgtttaacgaaacatgcccatcatttgatgatatctttgaagaatattatgcagcaggtcaacgtctaaaagaatttgtaacagacacatcaaaaatcttagacgatgcatttgtagcagatgaaaaggtacttttcgaaggtgcgcaaggtgtaatgttagatatcgaccatggtacatatccattcgttacatcaagtaatccaattgcaggtaacgttactgttggtacaggtgtaggtcctacattcgtttcaaaggtaattggtgtatgtaaagcttatacatcacgtgttggtgatggtccattccctactgaattattcgatgaagatggacatcatattagagaagttggtcgtgaatacggtacaacaacaggacgtccacgtcgtgtaggttggtttgattcagttgtattacgtcactctcgtcgtgtaagtggtattacagatttatctattaactcaattgatgttttaacaggcctagacacagtgaaaatctgtacagcttatgaattagacggtaaagaaattactgagtacccagcaaacttagatcaattaaaacgttgtaaaccaatctttgaagagctaccaggttggacagaagacgtaacaagtgtgcgtactttagaagaattacctgaaaatgcacgtaaatatttagagcgtatttcagaattatgtaatgtacaaatttctatcttctcagttggtccagatagagaacaaacaaatctattaaaagaattgtggtaaaactttatataagtcatacacaatgattataaatacatgagccttctatctttattggtaggaggcttttgttatgtttgcttctgtatcgattcgattatttagataaaaaatactaacgtaaaggtggtatttgctagtcataatttagaagattagatgatatttaatgaaaattaagataaaatacttgaatgtaggaagtctgatgtcgaaaatgactattaaaatagagtagacgtaagtgtgaatgcaagtatctaaaatagaaaaatttcaaaaatagcgtaattattataataaatagactgccaataaaatgcaatttttcacttataacattcttcaaaaaataatagcaaaattatgtaaaaaatatcttgtcatggcaagattggctgtgctataatctatcttgtgcttaagaacggctccttggtcaagcggttaagacaccgccctttcacggcggtaacacgggttcgagtcccgtaggagtcaccattttttaggtctcgtagtgtagcggttaacacgcctgcctgtcacgcaggagatcgcgggttcgattcccgtcgagaccgtacaaatgcctatccaagaggataggcattttttgcgtttaatattatattaataaaagacatatggacgaatgataatcatattgatttatctgttcgtccattttctttataatgtataaacttctggtaattcagttgcaatgtattaaagacaaatatagaaaacaaattttttaattagattaccatgtgcctttattaacatactttttcatagtgatagaccaaaagagctcacttaacataaatataatagtatttattttcctcacatccacaccaataggaatcccgattttttcgcacctttaataatataaaaatgatttcgtggtcatattatagggaaagactaatcattatcataatccgccgtgagaaattaataaaaaatattaatatataagtttatattggaaaatagaattaatagcttataaatggtaaattatataataggttactatacgttataagacggaaaatgcgcacaataacaaaaatagtaagcgacatcctgtgattttttacacaaacataaacgataaagaacaaaaaatgataaaataatattaatgatttaagaaaagaggtttatgcaaatggctagaaaagttgttgtagttgatgatgaaaaaccgattgctgatattttagaatttaacttaaaaaaagaaggatacgatgtgtactgtgcatacgatggtaatgatgcagtcgacttaatttatgaagaagaaccagacatcgtattactagatatcatgttacctggtcgtgatggtatggaagtatgtcgtgaagtgcgcaaaaaatacgaaatgccaattataatgcttactgctaaagattcagaaattgataaagtgcttggtttagaactaggtgcagatgactatgtaacgaaaccgtttagtacgcgtgaattaatcgcacgtgtgaaagcgaacttacgtcgtcattactcacaaccagcacaagacactggaaatgtaacgaatgaaatcacaattaaagatattgtgatttatccagacgcatattctattaaaaaacgtggcgaagatattgaattaacacatcgtgaatttgaattgttccattatttgtcaaaacatatgggacaagtaatgacacgtgaacatttattacaaacagtatggggctatgattactttggcgatgtacgtacagtcgatgtaacgattcgtcgtttacgtgaaaagattgaagatgatccgtcacatcctgaatatattgtgacgcgtagaggcgttggatatttcctccaacaacatgagtagaggtcgaaacgaatgaagtggctaaaacaactacaatcccttcatactaaacttgtaattgtttatgtattactgattatcattggtatgcaaattatcgggctgtattttacaaataaccttgaaaaagagctgcttgataattttaagaagaatattacgcagtacgctaagcaattagaaattagtattgaaaaagtatatgacgaaaagggctccgtaaatgcacaaaaagatattcaaaatttattaagtgagtatgccaaccgtcaagaaattggagaaattcgttttatagataaagaccaaattattattgcgacgacgaagcagtctaaccgtagtctaatcaatcaaaaagcgaatgatagttctgtccaaaaagcactatcactaggacaatcaaacgatcatttaattttaaaagattatggcggtggtaaggaccgtgtctgggtatataatatccccgttaaagtcgataaaaaggtaattggtaatatttatatcgaatcaaaaattaatgacgtttataaccaattaaataatataaatcaaatattcattgttggtacagctatttcattattaatcacagtcatcctaggattctttatagcgcgaacgattaccaaaccaatcaccgatatgcgtaaccagacggttgaaatgtccaaaggtaactatacgcaacgtgtgaagatttatggtaatgatgaaattggcgaattagctttagcatttaataacttgtctaaacgtgtacaagaagcgcaggctaatactgaaagtgagaaacgtagactggactcagttatcacccatatgagtgatggtattattgcaacagaccgtcgtggacgtattcgtattgtcaatgatatggcacttaagatgcttggtatggcgaaagaagacatcatcggatattacatgttaagtgtattaagtcttgaagatgaatttaaacttgaagaaattcaagagaataatgatagtttcttattagatttaaatgaagaagaaggtctaatcgcacgtgttaactttagtacgattgtgcaggaaacaggatttgtaacgggttatatcgctgtgttacatgacgtgactgaacaacaacaagttgaacgtgagcgtcgtgaatttgttgccaatgtatcacatgagttacgtacacctttaacttctatgaatagttacattgaagcacttgaagaaggtgcatggaaagatgaggaacttgcgccacaatttttatctgttacccgtgaagaaacagaacgaatgattcgactggtcaatgacttgctacagttatctaaaatggataatgagtctgatcaaatcaataaagaaattatcgactttaacatgttcattaataaaattattaatcgacatgaaatgtctacgaaagatacaacatttattcgagatattccgaaaaagacgattttcacagaatttgatcctgataaaatgacgcaagtatttgataatgtcattacaaatgcgatgaaatattctagaggcgataaacgtgtcgagttccacgtgaaacaaaatccactttataatcgaatgacgattcgtattaaagataatggcatcggtattcctatcaataaagtcgataagatattcgaccgattctatcgtgtagataaggcacgtacgcgtaaaatgggtggtactggattaggactagccatttcgaaagagatcgtggaagctcacaatggtcgtatttgggcaaacagtgtagaaggtcaaggcacatctatctttatcacacttccatgtgaagtcattgaagacggtgattgggatgaataataaggaacatattaaatctgtcattttagcgctactcgtcttgatgagtgtcgtattgacatatatggtatggaacttttcgcctgatattgcaaatgtcgacaatacagatagtaagaagagtgaaacgaaacctttaacgacacctatgacagccaaaatggatacaactattacgccatttcagattattcattcgaaaaatgatcatccagaaggtacgattgcgacggtatctaatgtaaataagctgacgaaacctttaaaaaataaagaagtgaagtccgtggaacatgttcgtcgtgatcataacttgatgattcctgatttgagcagtgattttacattattcgattttacgtatgatttaccgttatcaacatatcttggccaagtactgaacatgaatgcgaaagtaccaaatcatttcaatttcaatcgtttggtcatagatcatgatgctgatgataatatcgtgctttatgctataagcaaagatcgccacgattacgtaaaattaacaactacaacgaaaaatgatcattttttagatgcattagcaacagtgaaaaaagatatgcaaccatacacagatatcatcacaaacaaagatacaattgatcgtacgacgcatgtttttgcaccaagtaaacctgaaaagttaaaaacatatcgcatggtatttaacacgattagtgttgagaaaatgaatgctatactatttgacgattcaaccatcgttcgtagttcaaagagtggtgttacaacttacaacaataatacaggtgtcgcaaactataacgataaaaatgaaaaataccattataaaaacttgtccgaagatgaagcaagttcaagcaaaatggaagaaacgattccaggaacctttgattttattaatggtcatggtggtttcttaaacgaagacttcagattgtttagtacgaataatcagtcaggcgagctaacatatcaacgtttccttaatggttatccaacgtttaataaagaaggcgctaatcaaattcaagtcacttggggtgaaaagggcgtctttgattatcgtcgttcgttactgcgcaccgatgttgtgttaaatagtgaggataataaatcgttgccgaaattagagtctgtacgttcaagcttagcgaacaatagtgatattaattttgaaaaagtaacaaacatcgctatcggttacgaaatgcaagataatccggatcataatcacattgaagtgcagattaacagtgaactcgtaccgcgttggtatgtagaatatgatggcgaatggtatgtttataacgatgggaggcttgaataaatgaactggaaactgacgaagacacttttcattttcgtgtttattcttgtcaacatcgtattagtatcgatttatgttaataaagtcaatcgctcacacattaatgaagttgagagtaacaatgaagttaattttcaacaagaagaaatcaaagtaccggctagtattttaaataaatcagttaaaggcatacaattagaacaaattacggggcgttcaaaagactttagttctaaagctaagggcgattcggatttgaccacatcagatggtggaaaattattaaatgcaaacattagccaatcggtaaaggtcagtgacaataacttaaaagatttgaaagattatgttaacaaacgtgtgttcaaaggttcagaatatcaattaagtgagattagttctggttctgtaaaatacgaacaaacgtatgataatttcccgattttgaataatagtaaagcgatgttgaactttaatatagaagataataaagcgactagttataaacaatcaatgatggatgacattaagcccacagatggtgcagataagaagcatcaagtgattggtgtgagaaaagcaatcgaggcattatattataatcgttacttgaaaaaaggtgatgaagtcattaatgctagactcggttactactcagtcgtgaacgaaacgaatgttcaattgttacaaccaaactgggaaattaaagtgaagcatgacggtaaggataaaacgaatacttactatgttgaagcgacaaataatagccctaaaattattaatcattaatatgaatcgtaataagctagcattgcaagctcatcatatgtgagaagcggtgctagctttttgctggtatggtttattatggctgacgtttttgcgtcctaacatgcgcatttattcatatattaagtagaaccgcattgtaaaattaacgtaactgctattttaaaaactttagtatttgtctaatcattgttataataattaggacattcattgcacgtgattatcaaaatttaattataagagaccggtcgatgaactaaagttacagaataggaaaggtatacaaaacagctaatatactgatagtttctgtagggaaaatcgtatatttgcactgatgtatattgcagtcatatagagagattgactgcttaaatagaaaggatgagccgcttgatacgcatgagtgtattagcaagtggtagtacaggtaacgccacttttgtagaaaatgaaaaaggtagtctattagttgatgttggtttgactggcaagaaaatggaagaattgtttagtcaaattgaccgtaatattcaagatttaaatggtattttagtaacccatgaacatattgatcatattaaaggattaggtgttttggcgcgtaaatatcaattgccaatttatgcgaatgaaaagacttggcaggcaattgaaaagaaagatagtcgcatccctatggatcagaaattcatttttaatccttatgaaacgaaatctattgcaggtttcgatgttgaatcgtttaacgtgtcacatgatgcgatagatccgcaattttatattttccataataactataagaagtttacgattttaacggatacgggttacgtgtctgatcgtatgaaaggtatgatacgtggcagcgatgcgtttatttttgaaagtaatcatgacgtcgatatgttgagaatgtgtcgttatccatggaagacgaaacaacgtattttaggcgatatgggtcatgtatctaatgaggatgcgggtcatgcgatgacagacgtgattacaggtaacacgaaacgtatttacctatcgcatttatcacaagataataacatgaaagatttggcgcgtatgagtgttggccaagtattgaacgaacacgatattgatacggaaaaagaagtattgctatgtgatacggataaagctattccaacgccaatatatacaatataaatgagagtcacccgataaagttccgcactgctgtgaaacgactttatcgggtgtttttttatgttgttggtgggaaatggctgttgttgagattaaggttctagttgaaacgcaaaaaataattcgatattaaatgtaatttataaataatttacataaaatcaatcattttaatataaggattatgataatatattggtgtatgacagttaatggagggaacgaaatgaaagctttattacttaaaacaagtgtatggctcgttttgctttttagtgcaatgggattatggcaagtctcgagcgcggctgagcaacatacaccaatgaaagcacatgcagtaacaacgatagacaaagcaacaacagataagcaacaagtaccgccaacaaaggaagcggctcatcattatggtgaagaagcggcaaccaacgtatcagcatcagcacagggaacagctgatgatacaaacaacaaagtaacatccaacgcaccatctaacaaaccatctacagcagtttcaacaacagtaaacgaaacgcgcgatgtagatacacaacaagcctcaacacaaaaaccaactcgcacagcaacattcaaattatcaaatgctaaaacagcatcactttcaccacgaatgtttgctaccaatgtaccacaaacaacaacacataaaatattacatacaaatgatatccatggccgactagccgaagaaaaagggcgtgtcatcggtatggctaaattaaaaacagtaaaagaacaagaaaagcctgatttaatgttagacgcaggagacgccttccaaggtttaccactttcaaaccagtctaaaggtgaagaaatggctaaagcgatgaatgcagtaggttatgatgctatggcagtcggtaaccacgaatttgactttggatacgaccagttgaaaaagttagagggtatgttagacttcccgatgttaagtactaacgtttataaagatggaaaacgcgcatttaaaccttcaacgattgtaacgaaaaatggtattcgttatggaattattggcgtaacgacaccagaaacaaagacgaaaacaaggcctgaaggcattaaaggtgttgaatttagagatccattacaaagtgtgacagcagaaatgatgcgtatttataaagacgtagatacatttgttgttatatctcatttaggtattgatccttcaacacaagaaacatggcgtggcgattacttagtgaaacaattaagtcaaaatccacaattgaagaaacgtattacagtcattgatggtcattcacataccgtacttcaaaatggtcaaatttataacaatgatgcattagcacaaacaggtacagcacttgcgaatatcggtaagattacatttaattaccgcaatggagaggtatcaaatattaaaccatcattgattaatgttaaagacgttgaaaatgtaacaccgaacaaagcattagctgaacaaattaatcaagctgatcaaacatttagagcacaaacagcagaggttattattccaaataatacgattgatttcaaaggagaaagagatgacgttagaacgcgtgaaacaaatttaggaaacgcgattgcagatgctatggaagcatatggcgttaagaatttctctaaaaagactgactttgccgtgacaaatggtggaggtattcgtgcctctatcgcaaaaggtaaggtgacacgctatgatttaatttcagtattaccatttggaaatacgattgcgcaaattgatgtaaaaggttcagacgtctggacggcttttgaacatagtttaggcgcaccaacaacacaaaaagatggtaagacagtattaacagcgaatggcggtttactacatatctctgattcaatccgtgtttactatgatatgaataaaccgtctggcaaacgaattaatgctattcaaattttaaataaagagacaggtaagtttgaaaatattgatttaaaacgtgtatatcacgtaacgatgaatgacttcacagcatcaggtggcgacggatatagtatgttcggtggccctagagaagaaggtatttcattagatcaagtactagcaagttatttaaaaacagctaacttagctaagtatgatacgacagaaccacaacgtatgttattaggtaaaccagcagtaagtgaacaaccagctaaaggacaacaaagtagcaaaggtagtgagtctggtaaagatgcacaaccaattggtaaagacaaagtgatggatccagcgaaacaaccagcgccaagtaaagttgtattgttgccagcgcatagaggaactgttagtagtggtagagaaggttctgatcgcgcattggaaggaactgctgtatcaagtaagagcgggaaacaattggctagcatgtcagcgcctaaaggtagcacacatgagaagcagttaccaaaaactggaactgatcaaagttcaagcccagcagcgatgtttgtattagtagcaggtataggtttaattgcgactgtacgacgtagaaaagctagctaaaatatattgaaaacaatactactgtatttcttaaacaagaggtacggtagtgtttttttatgaaaaaaagctataaccgttgataaatatgggatataaaaacggggataagtaataagacatcaaggtatttatccacagaaatggggatagttatccagaattgtgtacaatttaaagagaaatacccacaatgcccacagagttatccacaaatacacaggttatacactaaaaattgggcatgaatgtcagaaaaatatcaaaaactgcaaagaatattggtataataagagggaacagtgtgaacaagttaataacttgtggataactggaaagttgataacaatttggaggaccaaacgacatgaaaatcaccattttagctgtagggaaactaaaagagaaatattggaagcaagccatagcagaatatgaaaaacgtttaggcccatacaccaagatagacatcatagaagttccagacgaaaaagcaccagaaaatatgagcgacaaagaaattgagcaagtaaaagaaaaagaaggccaacgaatactagccaaaatcaaaccacaatcaacagtcattacattagaaatacaaggaaagatgctatcttccgaaggattggcccaagaattgaaccaacgcatgacccaagggcaaagcgactttgtattcgtcattggcggatcaaacggcctgcacaaggacgtcttacaacgcagtaactacgcactatcattcagcaaaatgacattcccacatcaaatgatgcgggttgtgttaattgaacaagtgtacagagcatttaagattatgcgtggagaggcgtatcacaaataaaactaaaaatggagtaactattaatatagtataaattcaatatggtgataaaaacagcaaaaaaataaaatataacatcataaaggtgatgtgaatatattatacaaaaggggaatataatgttggaattaattactgatttttcaaaaaagtcttttaaaaattacagtatgaaggaagaattaaaattcaatgctataaatataatatacggagttaatgggaggggaaaaacttcattagctagaggtattaaagaaataatagaagaaaataatccagatagcttgaggtatttttacactgattatattcatgaacttcttttactagaagattccaataaatttaaaggggtaaaagcgacatttggtacaaaaaatgtagaaattgaaaataaaataatcaagctgaaaaatgaagttgttgatatgacggatactaaaaagttactagttgagaagagaaggaagttaagagaactaataaacgaaatacataagtcaagaaaagggaatcttaaaataccattaaaatcatcaaataaaagtatagaagaagtaatagctatttatgaaaaaaatttaaaagatgctaaaaaaatagagcataatatagaaagtataagaaattttgtagcgaatgatgaaacactttataataaatataatagcatttatgaagttatgattccaagcctaaaaattgaaacttatgatgtagatagattaacaaagattttacaaaataattatacagatataaaaattcctagttttgaagttatagattggttgcgtaatggtttagaattgcataatgttgaagagagtatatgtaaattttgtggaaacaatttaaattataatttgattaaagaaaaaatagaaatatatttattaaatgaaaagaaaaaagattttgattatcttaaagatgtcgaaaaatcaattgaacaattatcggataattatgaacaatatttatctaatattgatatatttgttaatgaattaggggtccaaaagtcagtagaagaaagtttgggagactcaattgatgaaattaagagaattttaaaacaaaaattaggaaatatggagaatgacaatcttaaatttccttctgatgattacattacattaataagcagattatctgaaattgaagaggaatgtaaggaaaagaagaaaataaaattaaaagaattaaataaaaaaacagaaaatataaatgtaatagttactggctctataagtttagaaatattagagaatcaaagtataagagaagaactttcaagtattcaatatgaagaaaatgaatgtaagaagcaagaacaactaaatgaggaaattaatgcaaaaatatcgaaattacatgaaaatcaatcggattataatgattttaaaatttacttaaatggtgtatttgaaagtattaatttacatattaggttgaaatctgatgaaactacacaaaattattatctttatcatgatttagaaaatatatcactaaatataaaagatataagtgaaggagagaaaaatctaatagcatttttattcttttattttgaactttttgaggatgagaaacaagaaaccattaaaagtaacattaaaacgttaatcattgatgatcctattaatagcttcgacgaagcaaatagattttacgttttagaattaattaaaaaagtacttaaaagcaaatttaatcaaatatttatatttacccattcttggaatgacttttgtgatataacttatagattaaaaggggaagatcataatttttatgaagtgtacaaagatcatcagggaactagttttttagaaaaatttaagaaagtaaagacgccttataaaaagttatttcaagagatttacgagttatcgagaaaaagtcaaaaggacatagttgaggaagattgttattactatcattcaataaatagcattagaagagtgtttgaagaatttttaagttttaagttaaaaaatagtgacctagctcagaaatcaaaccaaccagaaattgaagaagtttatagaaaaatgacaggcaatgaaatgagtaataacaaaaaaataaagttaggatcatttttaacaattataaatgtattgtcacataaaccatacagagcaatagatgtaattggttcagcaaaatttttgatgaggtatattgaagatgtagataaagctcattatgatgctatgaaggattgaattaatggtcgtataattttttatttgaaaagaacttaaaattcatggagaacataaattgaactattataagtatgctgaaaataaaatttagaagaaatagaaacttattgatacacgaagcagattgtagtaacttatcacctatgtttactacagtgagaagattagctccaaatagaggtagaataatgaattatttataagcttcgacagaagcgtaaatacctgtggaatttcatttgattatgacaagagaaagaagattatttagttcagagtttaagttacaaatggttagattatatgaaaatggtaagcctaggaatgaaattatacgcgagtatgatttaacaccttcgccgttaggaaaatggataaagcaatatcaaaacacgggtacattcaatcaccaagataacttatcagatgaagaaaaagagctgattaaattacgtaaagaagttcaacatttaaaaatggagaacgatattttaaagcaagcagcgttgatcatgggacgaaaatagaagtcattcaaaagaatgcacatcaatattcagtatcagcaatgggtaacgtcttaaaaatactaagaagtacctattatgattctataaaaagaaaagataataaaatcactaaagatgattcaaacgtagaacgtgccgtcataaatatttttaatgctaatagaaaagtctttgctacaagacgaattaaaaatcatttaaatgacaagggtcatactgtatcaagacgaaagataggtcgtatcatgaaaaaatataatctagtttctgtttatacgaaagctaaatacaaaaatcatccaaaagaaactaatgaaaaactaattaaaaatcatttgaatcgcgcttttaatagagaacaaccaatggagacattagtaagtgatttgacatatgtaaaagtcgcaggaacatggcattacatatgtttatttatagatttatttaatagagaaattgttggttacagtgcaggtaaaaataaggacgcaaatttagtatcaaaagcaatcagcagaataaatcataatcttgaacaaatcaaactattccacactgatagaggcaaagaatttgataatcatttgatagatgaagtcctagaaacatttaaaatcaaacgttcattaagtaccaaaggttgtccttatgataacgcagttgcggaagcaacgatgaaagcaatgaaaaccgaatttgtaaaacaaatgcaatttgaaaacttagaacagttaaaaacagaattatttgattatgtaaattggtacaacaattttagaccacattcttcattacagtatttgacgccagtggcatttaaaaatctacacatgaaaactgtctaaaaaaatgttgacataccaatgaaatcttgaaggatagcttttcatttagagtaaaagaaattgcaacgattattctcaatgagatagcatattctgttaacagatatcatgctcaaagattaattaaagatattatatctattggaattaaaccaataattgaggatattttaaaaggagataaataatggacaatagctttttagaaagcctaaaagagattttagaaccatatgatgatatagaatcaaataaagatggttttgtgtttggtggatatatagattggcctagtttcgttgattacgaagatttccaagttgaagaagtaatgagtttattagggttggacataccatttgggagttctaaaaatccgtttgaattttatgaaattttaaaggttatacaaaatattgaaaaaggattatacgaagctatttgtgatgaagcaattattataaaggaagatgaagaaattagtacagaggattttatagattcaattatggattataaggttcaaatccctacagtggataggttgaagagttcaataacagaattatttgaaaagtacgaaattcctcaaggtatacaatacgagtatgatgaaggaatgccagaatcatctaaatactggtcactagaaatggatgaagacctttattttattaaagaaataaattttaatgagtgttgatttgtcaatttaagtgcaacagttcatcacataaaacttcataaggaaacttccaatttaaacactttcttggtcgataattaattgagtctaatgcatagttaagttgctcttgatttactttagctaagtctgttttcttagggaaaaattctcttagtaaaccattggtattttcatttgtacctctttgccatgcggaatatggatcagcgaagtagacattaatattaaattggttttcaatattttgataacaagagaactctttccctctatcgacagtaatagttttaacggcacctttaggtagatgtttgataaggttattaattgccgtctccatagaattagaggaacgatcaggcataagtacacaataataataacgtgattttctttctgcgaaagtagcaatgcaccctttacttttgcctctgctggatacaattgtgtcagcttcccaatgaccgaatgtattacgtttctttatttccttaggacgttgtgaaataggacggccaatattaaacttacctctagtttctttaggtttctgtctttttcctttttgacgaaggcatgaaataagttcgaaattaatcatattagagttaatccatcgatagatggttttaaaacagatttggttttgtaatagacgacctacgatttgttcaggagaccagtggcattttaaataatatttaatgatattaccaagttctggagtaaatcgagtaggacgaccacaaagttttcttttggtttcataatttttttgagctgtttcagcttgatatgactgatttaaattattcctactaatttcacgtgagatagtagatacagatcgttttaatttacgtgcaatagatcttaaagaataattttcttgacgtaaaacctctatacgtgcgcgttcagttagtgtaagatggttatagctcatgttggcactccttgtatgtgtttttgtggttattaacatcttacaacaaagtgccaattatgggcattttttatgaatttttataggtgttgcacttaatattacaatccgtcgagtataaaaatgaaatagataaaattaaatctaaaattttaaatgaagaagacgagttagtaaaaaaatcattgatgttaacaatatttgtattatcggagagctatgttagttcattaattgtttctaatttacctgaaagagatgaaaatttaatagataaagcgtatgaaaaaattattcaacagtatataagtaaaaatatacgtacaagaaatggtagaaaagaactagtaaaaaatttttacaatacagatctaccagcaatacctcataccaaattgagagatgcccttgctcacgaaataaataaagttgatttaaaaaacaatcgttttaaatatgataatagtagaggtaatagaaatgaaaatattatagaagttagtattgacgaaataattaatgagttagaagaatggtttttaaatttagaatttccgtaaaaacctcatcatcaaccgataagcagaagcgtatcataagtagcggaggagttttttaccttgtgacttatcataaagtacgatgtttatgtaagtgattatcattatttaagcaggtttttcaaattaaataataacaagaataaaatgcacttagcgacattgaaatttattaatctagtaaactaatagatttatagaaaattttatttgcaaggggataattttgaaaagtagtattttctatctttccataatacattgtaattacaacggaggggatattgtgatgaagtgtatagataaaacgtgggttagctattataaagaattagctgataagttaacagattatcaaaataaacgttatgaattaattgaaatagtgaaggaagtatataaaaaaacgggaataaaattccctactttagcaagtgataatgtattgatggacatagatccttttacaatatttgcattatttaataaaaattccatgagagaaactaataaggtaaaaatattaacagaattagcttcggaattgaatattaagtccaaaattccgtcagtttttgacagtattccaacagtcaataatctgaatgctacatattataattttaaagattatggaaaagataatgatatagagaccttgtggaccttatttactgctgcattaaattttgcgaattatccttcagaagataataaattaaaatttatacatagttttgataagaatattactaaaacaggaaatgggaatagtaagattacgagtggtttgtactggattgcacctgaaacttttgctaactttgattcacgttcaatttggtacatttttgatacatataaactccctaaagaattgattaatgaacaacttaaaccaaaagaaaaactaacaggtcgacattatttagaattgataaatatgttaaagcaagttttgaagtgccaggaagtagagattaatgattttattgatttaagttatgagtcttggcattattcagaaatgataaatgaagctaatagaaacaaatttgattctaatatcaaagaaattgttgtcagtgaaaatgacaatataatacaaaatagaagtagaacaactaaagttataccatatggaaaacaagaattcttagatgaagtttttattgatgaaagtgattatgataggttagtacaacttttaagaagaaagcgaaatgtcattctacagggaccgcctggtgtaggaaaaacttttcttgcaaaacgtcttgcttattcattgattggcagtaagtgtaaagaacgaattaaattaattcaatttcatcaaagttattcatatgaagattttattatgggatatagacctactagttcaggttttgaactgactacagggacgttctatgatttttgtaagaaagctgataaagaccgcgataatgaatattttttaattattgatgaaattaataggggtaatctgagtaaaatttttggtgaattatttatgttgattgaaagtgataaaagagatgaagaactaatattactttatagcggtgagagattttctgtacctagaaatatttatattgtgggaatgatgaatacagcagatcgtagtttagcaattttagattatgcattacgcagacgctttgcgttttataatatgcaaccggcgtttcatacaactaaattcaaaaaacttcttaaagcaattaataatactgaattagagtcagtaattaattgtattgaaggattaaataaagagattgttcaagacgatatgttaggtaatggctttgttattggtcatagttattttagcaatattgaatgtatcgacaaagatgagctttctaatattatagaatttgagattattcctatgttagaagaatattggtttgatgaaccttcaaaaataaatgtatggtctgaaaagttaaggaattcaataaataatgattaatattaaaaatatttattatatgttatcttatgcatttacagtacttaacaaaaaaggctatcagaagttagcaacagaacaatttgaaaatatatttgatttatattcagctattcttataaaaggtatatcaagtcagttaaatagtggacttcatcatgaatatatagaacagacagattctctaaaagttattaggggaaaagttgatgttaagaattctatacaaggcttaggagttttaagtcaacgtattaattgtatttatgatgaattttcattaaatacatacatgaacaagattttaaaaactacaatgaaatgtttaataaaaacagatatttctagaaagaataagataaagctccgaaagttattagttcattttaataatgttgatactttagattatagaaatattcaatggtatcattcgtttgatcgaaataatcagacgtataaaatgttaatatctatatgctatttaatttttcaaggagtaatacaaactgaaagcaagggacaaaatgatcttatggtatttgtagacgaacaacaaatatctcggctatatgaaaaatttattctagagtactataaaaaagaatttccagagcttgttgtaacatcatcaaatattcaatggtcattagataatgatgataacgtgaatatgcttcctgtaatgagaagtgattttatgttgagatataaagataaatgtctaattatcgatgcaaaattttataaaaatacattacacaattattatgatgctaaaaagatccattcaactaacctgtatcaaatatttacttacgtgaaaaaccaacaattaaatttaaaaaagaaagcaatacaggtctcaggaatgttgttatatgctaaaacagacgaaaatattgttttgaacgataaatttcatatgagtggtagtcaaatcattattaagacattagatttgaactgtaattttactattattaaaaaacagttgaatgggatagttaatgatatatttttactaaaataatattaaagatttaaaattataaagatattaattatgattagtggtttcaaaatgttgttttttagaggtttaagattgtcataaatttagttttatttgttctcatgttcaagtttctttatatcaacttttattttagtaaaccttaaagagtagcaacttcaaaattcgcatttatatctaaaaataattttaaaatagacatgtttaaacaatcaaaagtgtgcattgttaaatcatcattttcaaaagtttattagcgaaatagatacgttagtcttaaaagtgattagtcgtataacagtaattgcaatttgtgaaagttaattttatagttgtatgaccaatttttaaataagattattaggtaaggcataatagccctgttaagtgataaacgatacaaaagtgatatataggaggcgatatcatgattactattgattcaaagattaataaacaaatcgctaaaaacctttcacttgaaggtatgtatgttacacgagaacagcaaatacaaattcttcatgcaattaataatgagaaagaaattacaaatgaacttattcgtaaaatcgcttttaaataatgaaatatatagcaacttttcaaaaggcattaaactatcttgaaaagttgcttattaaataataattgctcaaataaaaaacatataaatgctcttaccaaaaaaatattcgtaactaaaatattacaaagtaattaaaaagtgtgattacccaaaaatcctttttttattcagattgccttaatattgctcctaaatgttgctgtgcagtagtaaataatacgaatgtaattaacttgtcaatagcggttcaaaaatgctgttttatggcggtttgaaaatgtcgttttttagcggtttaagattgtcatatatttaatgatttttcggttttataatcttttaatcgatttgattctccagtaattttaaatacttttgaatggtgaacaaaacgatcaattatagctgctgatgcaatcttattactaaatgacaattcccaactcgaaaatgaaatattacttgtaaaattaaaaagtattaaacaaaaaacgtaattatgctactgaaatagctcaaaagaattatgaaattcgaaaaaaaaattgcaatatgccataatgctatctcctttctaaattaactcatcgcttcataaatacatttattcaaatttgtaaatcaattaataccaatgttgtatcattataatctatcatttattccttacctctataaaaaatgtctcaaaaaacatataaacaaatataaccattcaatcattaaagcataaagaacgctacttcatttccattaatatttatatagaaagtaaagtagcgttattctaacttatttagtttataccataatataatgtctctagaataaaacgctagtgattatggttttcttcaatttgataaaattcaatcgcattgcctcttaatataccattaatcgtgtcagggtcaatattactgtttttaatatagtctacgccgcgtgtatatttttcatcttggaagtaagggaagtctgaccccatcataaatttatccttaccaaatgtctcaatagagttaatcaatgaaggttcgtggaagtttgctgtatcataccaaaattgtcgatttaatacttcataaggatcaatattaaaggcattccaatcttcataattgtctttaatacgagtcatgaagaatggtaaagcgccacctaaatgtgaaatatggaatttaatatttggatatttttgcggaatttcatttttaatcaattgtaatgtaataaaggtagactctaacggtgcaccaataacccattctaattgatagtcattgactaacggactttgagcgccacaacctgttggatgaatataaattgtagcattgagctcattcatcgctgcaaagaaaggttcaaattgtttatcagcaacagagaacttatcttttactatagttggaatggcaatgcccacaaattcatcttttttcaaaagggcttgggcttcttcaatagcttgatcgacataaggtagtgagacagcaccatatgccaagaaacgatccggatattgttgaactaatctttcatataagtcattaatttcttgagcactttggtgagcttcttctttagtaccccattgtggagattgtggtgtcgcagaaataatttgtaaatctacgccagcatcgtccatcattttgaagcgtttctctaaatcttctttagacgcagattgattaatccctttagcaacttcagtaccttgactacctaatttgccaagtttgtctaaatagtcttcattccataaatgtgcgtgtgtatcaatcgcttttgtttcagtcatattatcccctccattaaaaattgtcattcataatttgcttattgccaatagcttatttattacgagttaagcttaacacttctagtaagcttaatacatttaaaaagaaaaatttagaagcagcttgtgcacctttataaccatgcccagctttataatggttataaatagctgtacccataacaatattaatcataatcgtaccaacaactactaattttttccctaatttaccgaaaatagaagtaaataaaagaagtgaaccaatcatttcgaaagcgccagctaatctcattgatctacgagataaaccaaagccttgttcgaattgttgagccatttcatcactattttgtacttttggtaaactgcttttaaaaattttactacctacatatgtgttaatgacgtgtcttaataacattttaaaatcctccaaataattaatgtttgcgaataaagaatgcaatgatagtacctataaaggcaatcaatgcgacgacatagaatgtaatatctagaccatgaataagtccttgactaccacttaatgaagaggtttttcctaatcctgtcatcaatgtgaccaagataccagtacctattgcagctgacacttgtctaatcgtattattcatggctgtaccatgtgcaatgtattgacgtggcaaagcatttaaagcttgagttgtcattggcgtcatgatcatagcattacctaacatggtaactgaaaatgaaataatcacatatagttgtgttgtattttgactaaattgagccattaataatgcaccaatcataatcgttagcatccccataatactcaagatacgtccaccaattttatcgaataatttaccagtgacaggcgataacagtcccataattaacccaccaggtaataaaataagtcctgactctaacggggaccatttcatcatcgtttgcatataaattggtaagattgttaaattccctataaataacatgaacattagtacaattaaaatcattgccactgaaaagtcgttatatttaaatactctaaactctaacaatggcgattccagttttaattgtcggaaaataaataccgttaatataactatggcagcaataatagttatattaaccattggatgtgaccaacctaagtttcctgctgtactaaaaccatatagtaagccaccaaagctaaccgtcgataaaataacggatagtttgtctaagtttggtttacttagttccgttatatttggcaatgatagatacccgaatacaaaatcaatcatacctattagtaatacgactaggaacagatagcgccaatcgaaaatattgacgaaccaaccagctgcagttggtccaatcgcgggtgcaaaacctattacaagaccgaacattcccattgccattccacgtttttcaggtggaaacataatgaaaaggagtgtctgtgtgagtggcatcagtataccagcacctaaggcttgaatactacgtcctaataataacattggaaaattgattcctagcatacaaataaatgaaccaatcattaaaaagcatgttgcattaaaaaataaagaacgtaatgtaaaacgttcaattaaaaatgctgtgataggaatcataatcccattgactagcataaaaattgtcgtgagccattgtgctgtactacttgataccgtaaaatctttcataatttctggaagtatcgtagtcatcaaagtttgattcagcacaccaacaaaagcaccaatcattacgacagctataacacggttccgttgtttcaaatctatattaaaggcatatacattcctcaaattttgacgcctccctctcttttaagtggaacctactatcatttattttatacggaatacgttccgtttgtcaatttaataactcaagggtatgataataggtatctgataaaatgaaaaacgcaataatgaaggaggtagtttatataaattttgaaggattagaacaatatttaaatggtgataatacaagatataacacgcttagtttagagacgcttaattattatttaaaacaatatgtgttaactgtcccgttcaaaaatatggatgttcaaaatgggatgaaagtttctgcagaagtaaaagatatttaaaataatgtagtgaaccatcaacacggtgacttttattatgaaatgaataatttctttaacgtgtattttgaatataaaggatttactgtaaatatagtttcttcaactatccatacccatggtgatggaaaaagcttaaaaggttctcacgtgtctttaatcatacctattgatggcgttgattatgttacaggtgctgactttggagacttgccatttagtgtcatgccaattgttccaaaagataatagtccagtcattcatgatatgaacggtgatttccatgcaatttacgtcaacgattatttattttatgttcgaaaaatggggaaagataatgacaataacttggatcacactatgaagtggaattaacacctcgtcatattcatgactttgtttacaatattgaatataatgaaattaatcctaatgctatttttgtgaaacgctagttagtaacaatgattaaatctttttggtcgtgctacaatgttacaaaataatataactttaactaagcaacaaaagaaagaataatatgatgtaacacctgagaatgatagacaatttttagaagaagcatttaatttagatgttaaaattgatagattagaaagttaaaaacaacgttaaaaagaggaatataatggaaaaaaatcaacgaaaaaaacgcagtgatgccgaatataaccaacagattatcttaactacaatggaagatttactagaacagggtgaagatataagtactaagaaaatgtcagatattgctaaaatatcaggtgttggagttggtacattatatcgtcattttgaaagtaaaacattgttgtgtcaggctattatggataaaaaagtcgatcaaatgtttatagaaatagaagatattttagcggaaaatacacagtggcccgtgcgagataaaatcaatgttatattaacaaagtatctagatttaaaagaagcaaatttcacaacattaaattttatagaaaaatccagttcacactctagttctgtaattaatattccattctttgagcgactaaaaaacttattaattcaacaattcgaaaatgttcattccatagcagacttggattttaaacttaatctaatgctcaatgcattttcttcagatttctattattttgtaaaacataaccaaaaattaacaaaacaacaatttttagacaaattactagatttatatctaaaataatatgttctgaaaaatagaagtattttttgaatcactaaataacgcgctattaaatggcttcgctatgcccgtctaacacattagtgtaaaattttataaattgaatttttgatgacgggtcccttcctagggtgctctctcagacaccccaaccggcacattattgtaagttgacttttcgataatattaaagatttaaaataataaagctattaattatgattagtggtttcaaaatgctatttttagaggtttaagattgccatgaatttcgttttatttgttctcatgttcaggtttctttatatcaacttttattttagtaaaccaaaaagagtagcaacttcaaaattcgcatttatatctaaagataattttaaaatgcacatgtttaaagaatcaaaagtgtgcattgttaaatcatcattttcaactaataaggattattaacagagagaagtgacttattttggaatataaatcttacaacaaaatgagtaataatattttatctatcttgttgagtgaaaaaaatttcgataataaaatggtagtctcaacaggtagttacattttgtctgagttgccatgtattgttgcctataaaaataatgatatcgtggggctactaacgtataaagtttatgatgagtatattgaaatcatttctttagatagttttgtagagaacaagggtattggtagtcatttacttaattatgctgaaataattgcctcagatatgagtaaaagaagtatcagtgttattactacaaatgaaaatattaaggcactctatttctatcaaaaaaataaatatagaatcacagacgttatttttgatgctgtaacagaagctaggaaaataaagccgtcgattcctgaaatgggtgaaaatggcattgaaattagagatgaaattgtattgaaaaaatgtttataacgtataaatatacgttgttttaaatcaccctagttcataccaaaaagactttaacacaaacaaaaaggaggaaacttaaattcctcctcaacctttattactcatactataattctagtttaacgtcttcgtccatttgggcttcaaattcatctagtagtgctcgtgcttctgcaattgattgtgtgttcatcaattgatggcgaagttcactagcgcctcttatgccacgcacatagattttaaagaatctacgtaaactcttgaattgtcgtatttcatctttttcatatttgttaaataatgatagatgcaatctcaacagatctaatagttctttgcatgtgtgttcgcgtggttctttttcaaaagcgaatggattatggaaaatgcctctaccaatcatgacgccatcaatgccatatttttctgcaagttcaagtcctgtttttctatcgggaatatcaccgttaattgttaacaatgtgtttggtgcaatttcgtcacgtaaatttttaatagcttcgattaattcccaatgtgcatctactttactcatttctttacgtgtacgaagatgaatagataaatttgcaatgtcttgttcgaagacatgcttcaaccaatctttccattcatcgatttcatagtaaccaaggcgtgttttaacacttaccggaagtccacctgctttagttgcttgaataatttcggcagcgacgtcaggtcttaagattaagccggaacccttaccctttttagcaacatttgctacaggacatcccatatttaagtcaatgcctttaaagcccattttagctaattgaatactcgtttcacggaactgttctggcttatctccccatatgtgagcgaccatcggctgttcatcttcgctaaaagttaagcgtccgcgcacactatgtatgccttcagggtggcaaaagctctcggtatttgtaaattcagtgaaaaacacatccggtctagctgcttcacttacaacgtgtcgaaagacgatatctgtaacgtcttccattggcgccaaaataaaaaatggacgtggtaattcactccaaaaattttccttcataatatatttataccctctttataattagtatctcgattttttatgcatgatgatattaccacaaaagacgaacttatacaaaaggaattttagttgatacaaccatttgaaagggaagtctacgagtagtctaaaatgaatgttgtggtaagttgatcaatatacaaatcaaggattatcgcgttaaattgttcattattaatgatacactacttattattatgattcagaattttctttggctacatatacagtaatgtgatttatacgttatcttataacaaaggcaaatttataaaggtgatattatggaagatttaaagcaatctttaaaaggtttaggttggtatgactttttttatagtacctatgtttctactattcgtgtatctgccgaattataattttataactatatttattaacattgttatcattattttcttttccataggtttgattttaactacgcatataattatagataaaattaagagcaactcgaaatgattcattaacacgaatgtgattaaacataaaactgaaggagcgattacaatggcgactgagaaagatgtaaatgatttatttttaaatcatgtgaattcaaatgctgttaaaactagaaagatgatgggagaatatattgtttattatgatggtgtggttataggtggtttgtatgataatagattattggtcaaggcgactaaaagtgcacgtcatcaatttcaagataatgcattagtatcgccgtatcctggtgctaaagaaatgatattaattccagactttgccgaagcaacaaatattactaatttatttgagtgcataaaaaatgatttgaaaaactaatcataaattgccatgctcaactattttgaaaagcatcatttccatattatcaaattattgagtatctcgatttattgttatacacaaacagtatttttgttatcatagagcttataaatataataaattgaataagtaactttacaaaactagaatgattcaattcaatcacaattatttgaaaatagaggtgagcaggtgaacgatatgttaattagtctcgtaatcccagtttttgctttgttagttattggtggtattatttggatgattatagaaggtatagtacatatttcaaaaaagaataaagcaattgataacttttttaacaaagttaataaagtaagtgagacatataaattcgctactacttttttatttctaatcttggctacggctggtatttctcaattttatctatattatatagtatcagagtttctttttttgctggttatatttacctttggtattgcaggtatcatttttttaatgccatatggcttatgtttcctaccactttataaacaaaaaaagaaaaaacagacatttaaaaaatacatggcttacactacgattggtttgtcaatttatctaggcttatctctagttttggttcacactacgaaaatttatatggacgaaggtggcgtaagatactattacggtagttttgtaatgaaacaagcgggcggttatgcttatttagctttagcagtactttcaacgttgttaattgttgcgaaaaaagctacaaataaaaataaaaaaatcgaaaccgtcgacaatacaaatataacggaaagataattaagagagtgctcattcaggagtgctctttttttgatgttcaaatttagttggaaatgaaggcatagaagaaatttttatagtcatttattggataatgaattatggtcatatcgattaattttattagtgaggattttacaaacatttgttgaataaatatggtaatgataatatatgaatatttttgaaaaaacactaatatgattaaattatttgttaaaatagcattaagtaaaaaacaaacagggaacaaggtgggatttcatgagtcaattgctaaatgatacgttatcggcttggttgttaattgaatctttaagtccaggagaagtaaattttacagcggaagatatactctcagctgaaaattttaaaaatggtgcaaagcaagcgcaacttcaaagttttgatgaatattttgaaatatggaatgatgaacgctttattatatcagaagaaaaatcagagattggcgaaatcatttttaaattttacagacactgtttccgctataatgaaattaatttgaaaattcaggatatttttgatgattattcagatattcataatccaaatgggacacactgttatggttacacatttaatatagataaacacggtcaagtgatagttgattctatacatattccgatgattatgagtgcattgaaagaaattgaaaagaataaaaatgctaatatagaagaaaaatttaatgattctgttgaaaaatttgttcaaaaagtaaaagaaattttagcggatgaaccaattaatgaatttaaattgaagaagatggacatagcttatgatgagtatttttctgtattaaattcaaagaaagatggattatttgcacattatgtagcaatagaatatgtgaaagatagtgatttaccacagccagaatttaatagcttcttcataagtgatattgagaaagcaagaaaatctcccaatcaaactttaattgattacattgagggtgtagaagaaagtaagcgcatagaagtggatgaaaataaagaaatgttcgacaaatttttacatccttcacgtttgcctgatggacgctggccatcacagactgagtttagattgtcattaatgcaacaacttgctgtaaaccaaattacgagtggtaatgaaaggataagttcagttaatgggccaccagggacaggtaagactactttattaaaagatatatttgcgcatctagtagttgaaagaggtaaagagttagccaaactaaataatcctaaagatgcatttgtcaaaacaaaaactcatgaaacagatgataaatatgtctatttacttaaggaatctattgctaaatataagatggtagtcgcatctagtaataatggagctgttgaaaatatatctaaagatttaccgaaaattgaagaaattataagaaatcccgaaaaatgtaaattccctaaatatgaacagaattatgcaaatttagcacatgaattaaaagattttgctgaaatagctgaagatttgattggtgaaagtgcctggggcttattttctggagtatttggtaaaagtactaatattaaccaagtattgagtcatatgttaaaacaagatgcgaatgatattggctttgctaaattactacaaaatgagaataatcgtatgagttataacgagttaatgagtgaatggcaatcacatcaacgtgcatttttagaagagttgaggcatgttgaaatgttaaaagaagaatctattagagcctatgatgtttataaaaattgtgagtcttactctaaggttgaacatgaactaaatagcaaaaaaatgaatgttaaggaaaagttgaatcatttagaaattcaaatatcttgtgacaataaagaaattgaagatttggatgatcgaattaattataatacaaagcaactcgaaactttaaatgagttaattaaatccatcagagatagtaacaaagggtttgttaacaagctgaaggcgatatttaattcagaagaagatgaaagatataaaaaacataatgcagagaagcaacaattattaggacaacagatagagttagagaaatgtaaaaaaattaaaaatgaagaccttgttagcaaactaaaagaaaaagagaaattaattaaacaattaactaaagtacagttgcaattagacgagttaaattcacagttacaagagttagaagcatatcgtattgagtcaaaaattacaattccagaaaaagatttttggagtgacaacaattatgatgagcgccaagttactaatttgtggacgagtgacgaacttcaatacagacgtgccatgctctttttaagagcaatgatattgcataaattattattgattgctaataatacaactatttattatgcgattaatgattttaaaagtagaaggaaattaattgatgcaaatccagataaagtacacaacgcatggaatgtgatgcatttaatatttccagtagttagtacgacgtttgcaagctttaaatctatgtatgggggcataccaagagatttcatagactacttatttattgatgaagcaggacaagcaatacctcaagcagctgtgggagcattatttagatcgaaaaaagttgtagccgtaggtgatccgattcaaattgaacctgttgttactttagaaagccatttaattgataatattcgtaaaaattataatgttccggaatatctagtttctaaagaagcttctgtgcagtctgtcgctgacaacgctaatcaatatggcttttggaaatctgatgctactgatagtaatcaaaaaacgtggataggcatacctttatgggtgcacagacgatgtttaaaacccatgttcacgatagctaatcaaattgcttataataataaaatggtgctacctagtaatattacaaacgtaggtaagaccggttggtatgacgttaaaggaaactcagtacaaaaacaatttgtgaaagagcatggcgaaaaagtattggaattactagctaatgattggtttgaagcgattaaggaaggtaaaaatgagccgagttcatttgtaatatcaccattttcagcagtacaaaaacaggttaaacgtatattaaagcaacaactaccgactagaattgatattgaacgtacaaaaattaatcaatgggtcgataaatccattggtactgttcatacttttcaaggtaaagaggctcaaaaggtgtattttgtaataggtactgataatactcaagatggtgctgtgaactggtcatgcgaaaaaccaaacttgttaaatgttgcagtgacaagggctaaaaaagagttttatgtaattggtgacatgcaaagaatacagtcgaaaccattttatgagaccatttttaaagaaagaaatgtaaaatgaaatgacagcatttctataggctaatcaagtgatacttaattaccgcgcaatttatacattttaaaaggagtaaaattgaataatgaagaaatttaacaactggatattaaatgcaataagtggatctcaaacagacaagaatgaaacaactgaagaattaaaaggggcaaaatttattattttatatgcatattcaatgctcgttttgcttgcgttagtaatttctaacatattcattcacattttggagcctaaactatcaatcaccactcaaatcatcatcgttttgattttaattgaatcactaattggactgcgtttcttgaaagagtacgatgttaagcgtggcaaagataaagaaaataagaaaaatagtaaggatttcgttaaactaaaatcaattttagtagcaattttatttacatcattggcgctgacagcaggcactgtagctgatatatacggtttcactgacttaggaaatactagaagtgatttaatcgtttggagcataggtggtattatatttggcctcgtatgttacacaatggaagataaaaaataacgataaggagctggcgattataaagctagctccttttttaacttatatatgtaaagaactattctaaggatttttaatcatgtgtcaataattcctataatacattattaaaacatcaattaaataagttttaaaattttacacatatttttatttaaaaaagatgtataattaatgtattaaatatagaaagaagttgatattatgaaaaagtgtattaagactttgtttttaagtatcattttagtagtgatgggtggttggtatcattcagcacatgcgttagattcgttgagtaaaagtccagaaaattggatgagtaaacttgatgaaagcaaacatttaactgagattaatatgccaggctcacatgatagtggctcattcactttaactgacccggtaaaatcagtttgggcaaagactcaagataaagattaccttactcaaatgaagtcaggagtcaggttttttgatattagaggtagagcaagtgctgataatatgatttcagttcatcacggcatggtttatctgcatcatgaattaggaaaatttctcgatgatgctaaatattatttgagtgcctatccaaacgaaacaattgtgatgtctatgaaaaaggactacgatagcgattctaaagttacgaagacatttgaagagatttttagagaatattattataataacccgcaatatcagaatcttttttacacaggaagtaacgcgaaccctactttaaaagagacaaaaggtaaaattgtcctattcaatagaatgggtggtacatacataaaaagtggttatggtgctgacacgtctggcattcaatgggcagataacgcgacatttgaaacgaaaattaataatggtagcttaaatttacaagtacaagatgagtataaagattactatgataaaaaagttgaagctgttaaaaatttattggctaaagcaaaaacggatagtaacaaagacaatgtatatgtgaatttcttaagtgtagcgtctggaggcagcgcatttaatagtacttataactatgcatcacatataaatcctgaaattgcaaaaacgattaaagcaaatgggaaagctagaacgggttggctgattgttgactatgcagggtatccgtggcctggatatgatgatatcgtaagcgaaattatagatagtaataaataaggattcaataatgatattaagacgagtatgaaaatagttagattctaattattttcactactcgtttttattttgaaaataagtaatgattcaacaatattataaattgaacagattgtttgtggaatttttgataatattaaagtgaaaaagtgttataaattgatattaatatgtaatttgcaaaagtaaatcattttaaaaagaagagagttgtaagatgatgaaacgattaaacaaattagtgctaggtattaatcttctgtttttagtcattagtattactgctggttgcggcatgggtaaagaagcggaaattaagaaaagttttgagaagacattgagtatgtatccgattaaaaatctagaggatttatacgataaagaaggttattgtgatgatcaatttgataaaaatgataaaggtacatggattgttcgttcgtcaatgtcgattcaacctaatggaaaagatatgaacgtaaaaggtatggttttatatatgaatagaaattcaagaacaacaaatggctattactatgttgatgttatagaaagacaagataaaggtatacatcgtgataacgaaaaaaagtatcctgttaaaatggtcgataataaaatcattccaacaaaagatatcaaagatgagaacataaaaaaagaaatcgagaactttaagttcttcgcgcaatatggcagctttaaagatttgtcgaagtacaaagatggagatatttcatataatccagaggtgccgagttattcagccaaatatcaattaacgaatgatgattataatgtaaagcaattacgtaaaagatatgatataccaacaaataaagcaccaaagttattgttgaaaggtacaggtaatttaaaaggctcatcagttggatataaagatattgaatttacgtttgtagagaaaaaaggagaaaatatttactttagtgatagcctacatcttgaaccaagtgaggataaataatcatccacacacacgattcaatatgaaattcaaatatgttgctgtaaaataatgtaaaataaacgtattcatattactgaattgagggatagtatgcaacgtgattatttaattcgagtagaaactgagagtatgttagatttcaaaaggctcaatggtttaatgattggttttgttattaaaggtgaggcacacatttatgatgaaaataatatgacgcaatgcaacagtggcgacattttcatcattaaccaccgcgacttgtatcgatttcaacttcaacaagatggcatcatatgttatatccaattccaaatgaaatatttagcagacaagtttgatgatgtgcattgtctatattttcacttaacagatgcgaccacaacaaaaaatatacatcaactgagaaatataatggcaagactggtttcaacacatattcgacataatgagttgtctaaattgactgagcaacaacttgtcattcagttgcttatgcatatgattcattatgttccgcgtacatatcattcgaaccaaagtatcttaaatgatgataaagtgaatcaagtatgcgactatatcgagttacattttcatgaagacttaagcctttcggaattaagcgaatatgttgggtggtcagagagccatctgtctaaaaagtttgcagaatcgctaggtgtaggattccagcatttcttaaatacgacgcgaattgagcatgcgaaactcgatttgacatacacagatgaaacgattactgatattgcattgcaaaatggcttttcaagtgcagcgagctttgcgagaacatttaaacactttacgcatcaaacgcctaaacaatatcgaggtgatcgtccagcaatcactgaaaatcagcaatcggcacaacataattatcacgaccgtgaattgatattacttttaaatgactacattgaagaaatgaatcatttcattgaagatattgaaaaggtgaactataaagagattacctttcaaccaaccaatcaccaactaaatcaatttaatcatattattcaagtgggctatttgaggaatttgctcaatacacagtatcaatcacagttgcttacatgtcatagtgattttcaagtcaatgaagtattagcatatgatgtgatgccatatattatgaaaaagctcaatgcgccattcacgtatgatgcagaaatttcgaatatattttatgatattgatttgtgtttagactttttattagatcataattttagtctaaccatgcatttgaatcagtatgactcacgagattatatcgatgcattcaaagtatttatccatcacgttgccctgcatgtcagtcatagaaaagatttgaagttcaacttgtatgtgacgacattgcacaattctttgattgaaatgattgattattttaaagcattattccccaatggtggcttgtacgttcacttagatcaagctacggaaagacatctaccattgttgaaacgacttgagccacacatcgaccattttgtatttgatgctaattcaaatgatgctgttgattttaataaaatgaatgatgatgaatttaaaaccgcgagtcaaatgattattaataaaacgaattaccttatcgacttaatgcatcgtcatcacctaaagcgtccactcattttactcaattggaatacattgacgggtgatacatttattacaaacggcgaatattttagaggtggtatcatcattgagcaattattaaaattaagctcaaaggtagaggggatcgggtattggttgaattatgatttgcacgtcagtcattgtaaaaatgaacgggattatatgaattctattgaactgtttcatcaatataatggaaaacgtccggtctatttcacggcattgttatttaataaattaacaagcaatattttatattctgatgatacatgtattgtcacgggaactgattcaaattttcaaatattgttatatgatgcaaagcattttaatccatacttagcgttggacaatcaaatgaatatgcgtgcgacggaaatgattcatttgaacataaatgccctagaagaaggtatatataagattaaacattttaccttagataaagaaaatggtgcattatttaatctttggcgaaaacatcatacgatacatggcatggacaaggactctatagattacgttaatcgaatgagttttccaaaattagaagtgtacgatatagatgtgacggatacgctggcattaaacattaaaatgattacgaatgggattcacttaattgaagtaaaacgttacccaagttcataaaatgatcacaaatcgcaaattttgttatacataatttgtgattttttgtattcaaagttaaaattgcaaaaaattaatggttaacatctctgttgttggcaatataaataatgatcaatcatatatgatgtaactaaggagatgaatgatatgaatcaacaattaattgaagctttaaaatcaaaagaagacaaaatgattgagatcagacgttatttacatcagcatccagaattatcttttcatgaggatgaaacggcgaaatacatcgctgaattttacaaaggtaaagatgtagaagtagaaacgaatgtcggaccacgtggaattaaagtaacgattgattcagggaaacctggtaaaacattagcaatccgtgcagactttgatgcattacccattactgaagatacaggattatcttttgcatcacaaaataaaggtgttatgcacgcatgtggtcacgatgcacatacagcatacatgcttgtattagcagagacgcttgccgaaatgaaagatagttttacaggaaaagtcgttgtgatacatcaaccagctgaagaagtaccaccaggtggtgctaaagcaatgattgaaaatggtgtattagacggtgttgatcatgtattaggtgtacacgtcatgagcacaatggaaacaggtaatgtgtattacagacctggttatgttcaaacaggacgcgcattcttcaaattgaaagttcaaggtaaaggtggtcatggttcatcaccacatatggccaatgatgccattgttgcaggtagctacttcgtcacagcgttacaaacagttgtatctagacgactaagtccatttgaaaccggtgttgtcacaatcggttcatttgacggtaaaggtcaattcaatgttattaaagatgttgttgaaattgaaggtgatgtacgtggattaacagatgctacaaaagcaacaattgaaaaagaaattaaacgtttatcaaaaggattagaagcattgtatggtgtaacttgcacattagaatataacgatgattatcctgcattatataatgatccagagtttactgagtacgtggctaagacgctaaaagaagcagaccttgaatttggtgtcgaaatatgtgaaccacaaccaccttcagaagactttgcatactatgctaaggaacgaccaagtgcctttatttatacaggtgcagctgtggaagatggtgaaatttacccacatcatcatcctaaatttaagatttcagaaaaatcattacttatttcggcagaagctgtagggacagttgttttagattaccttaaaggagataactaacatgaatgaaacgtatcgcgggggcaacaagttaatcttaggtattgtattaggtgttattacattttggttgtttgcacaatcacttgtaaatgttgtgccaaatttacaacaaagttttggtgcagacatgggaacaattagtattgcggtaagtctaaccgcactattttcaggcatgtttgttgttggagcaggcggcctagcagataaaattggacgcgtgaaaatgacaaatatcggcttattattaagtattattggttcagcattaattattattacaaatttaccagcattgctaattttaggccgtattatacaaggcgtatcagcagcgtgtattatgccttccacattggccattatgaaaacttattatgagggtgctgaacgtcagcgtgccttaagctattggtctatcggttcttggggtggaagtggtatctgttcactcttcggtggggcagttgcgacaactatgggttggagatggattttcatcttctcaatcatcgttgccgtactttcaatgttactcatcaaagggacgcctgaaacgaaatcagaagttaccaatacacataaatttgacgttgcaggtctaattgttctagtagttatgttattaagtttaaacgttgtcattactaaaggtgcagcacttggttatacatcattatggttctttggtttgattgcaatcgtaattgtagcattctttattttcttaaatgttgagaaaaaagtagataatccgcttattgattttaaattatttgaaaataaaccatatacaggtgcaacgatttcgaacttcttattaaacggtgttgcaggtacattaattgtagcgaatacattcgtacaacaaggtttaggttatacagcattgcaggcaggatacttatcaatcacttatttaatcatggtgttattgatgattagagttggtgaaaaattattacaaaaaatgggttctaagcgaccaatgttattaggtacattcattgtgatcattggtattgcacttatttcattagtattcttaccaggcatattttatgttatcagttgtgtcgtaggatatttatgttttggactaggcttaggtatttatgcaacaccttctacagatacagctatttcaaatgcaccgttagataaagttggcgttgcttcaggtatttataaaatggcttcatcacttggtggtgcattcggtgtcgcaattagtggtgcagtatatgccggtgcagttgctgcaacgagcattcatacaggtgcgatgattgcactttgggttaacgtattaatgggaatcatggcatttatcgcaattttatttgcgattcctaatgatgataaacgtgtcaaagatgcgaaataataacgatgacatgcccagtgttttgataatgatttaaatgaaaataaagcaaattaaatgaggaaatgtatagagcagtgcatatagataaatctatgattggattaacactaatataaatataaataaaaaaccatccacttaaacttttgataagttaggtggatggttatttattgcgttgttctaaaaatttggacatttatatggaaagaactatatataatgtgaaggttatggcaattcgcttcaatgaaggcgacgtgtaaaagtgtatattaaacgtttcggggtcagactccgagaacagtgtccgtcatgcttaccgcatactaatgaagcattattatatcagtggttctagccgatttaagataataaattttgctaaacaaaaaagccaacccatgaatgttggattggctttttacatgcatctgaatctctaattttaaaaaatatgaatataaataagacattaaaaattaaatttcagttgttgcaatttcttcatctgtaggtacatcatcgttaagaccaacaagtgcttcagaaacatttcgtgaatgataaccgatacgttcaagaacaccaatcatatcgatatatagtaatccgccttttgttgtacattcaccacgattaaggcgtttaatatgacctttgcgtagtttatgttcaatattaaatgattctctactacgctctacaatttcatcttttttcgttttgtcataaacatctaacatgtcaatggctttatcaaatgactcagcaacatggttgaataatttatccataccgcgttgtgcatcttctgtaatgcgaatatcttcatcatgttggcgttttaattgagcgacatactcttctgttagctctgctacttttaaaatagagcgattgacatcaaacataactgctaaacgctcaacgtctgccttcgtaatggcttttgtagaaattctaactaaataatttcgaatactatcattgattgtttcaacagcttgatgcttttgttcaagctttttgattaattttttgtcgtcttttgtaatttcgcgaatgtcttcaaacattgataagacaatctgacccacattttgtaattctttttgagtttcttgtaatgcaacaccaggtgcgtgataaacaagatctttgtttaagtgctgaggtttatagtcatcagcaatatctttacctgggacaagctttgtaactatccatgctaaacctgctacaaatggtaattgaatcaaagtatttgttatgttgaagataccatgtgatactgcaatcgtcatcgctggttttaagtgccatacatcttgtaacaaactaatcaaatgaatcacaactggcaagaaaattgtgaagataattaccccgattaagttaaagatgacgtgtacaagcgccgcacgttttgcagcgattgagccggctaaactagctaagatagctgtaatcgttgtaccaatattatcgcctagtaacacagggattgctgcgtttaagctaattaaatcttgttgataaaattcttgtaaaataccaatcgtcgcacttgaactttgaactagtgctgttaaccctgcgccgacaatgacagcaagtattggatttgtagacatatcaagcattaattgcttaaatccatctaatgatgctaaaggtttaacggcatcacccataaattctagaccgaagaatagagaaccgaaaccgaatagtatgcggccaatgttattgattttagagcgcttaaagaaaaagattaaaaatgcacctaatgctaaaattggcattgcatattcgcctaaatctataccgataataaatgctgttaccgttgttccgatattagcacccattatcactccaatggcttgttttaacgtcataaatccagctgttaccagtccgattgtgataactgtcgtacctgaactactttgtattaaaatagttacaacgatacctgcaataacacctaatactggatttgatgtaaatttgtttaaaatatctcgtagcctgtctcctgctgatgcttgaagtccgtctcccatgatttttaagccgtaaaggaaaatacctaaaccacctaaaaaggagaaaatgacttctgtaaccgacatttccattatttcacctcaaataagctttatattttgattatcgcttataattgtaaatttaatgttaagattaggtaaaattatttaacaatatatgttatttgtatatgacttgtaaaatatcgtcacttattatgtaaattttcagtgtgaaatggcaggtttgtaatcacttgtttaacaaaatgatgcaatcaatcatgcaattatgtgtcatcaaaaaaaatcatgtgagtgggataatgaaataaagtttgtgaacatatgatttctatcccactccatgatttgaaatcaccaaataaaaatctattaatggttttcgttataacaatttgtgctcttttaataatgactcaatgtacgtaccttttatctttttaaggaatcctgctaatgcgagtttttgcattttcgaatctttagtaatctcgcgcaaatcttgatggtcattcagttcgtatacggcatccattaagacgcgaagatcaaatgtactattgatgacctctggaataccacgatctatatttagtaattgataaacagcttccatggcagtacgaaccgaatattctgttgtaaatacagtatctcgctctgtttctgcaaagttaccaataaatgctaaattttgtgattgatgcgggacgactaaaggtctgtcgccgatagcacgcgtcatgaaataagaggtaatatatggcatataaacaggaatcgtattagatgcatgttttgctaagtcttcaattttgtcagttggtacacctaagtgatatagccattcttgacatatttcattaccactacattctgtgattggctttttaatataatcgccgtttacatctgaatataaggcataaatccacgtagatatttcatttttaggttggtctttaaactgttgctgacgattgattgtaaaactgatttgccatgcagaatcattgattgtaataattccgccagtaaccgttttgcctgcaagagggtcacgtttacaaatgctttctattgtatcgataatatctttattgtttgttgtcgatgttgcagaaacaaaccaactttttttaggaatattttggcaaaacttatcaggattaccaaattcaggactttgtcgtgctaaatttttccatagtgtccaactaccacctaattcgtcagttggtggcgctggtgtatcattatcaccataagtagagctttctgtaatactaccgtttgtcacaaagacaagatcgtttatagtcagtttaatagattctgcattaccattacggtcaattaatatttctcgggcaattttttgacttgtcgtaacatctactttaatatcttttacttttacatcgtattcaaattgaaccccatgcgattttaaatattcaaccataggtaatactaaggattcatattgattatatttagtgaattttaaagctgaaaagtctgcgagaccaccaatatgatgaacgaatcgcattagatagcgacgcatttccattgcagaatgccacggttcaaatgcaaacatcgttttccagtaaatccaaaagtttgaattaaagaaatcgtcggaaaatacatctgttattttgacatcatctaaatcttcttcattcgttaagcataaatctaaaatttctttaatcgccgttttagtcaaagtgaagtctccatctgtgactaaacgttgaccctgtttctcaataacacgacagcgagaatagttagggtcttctttgtttaaccaatagaattcatctaatactgacgcatgatcaatttcaagtgaagggatagatctgaataaatcccacaaacattcaaagtggttctccatttcacgaccacctcggacaacatagccttttaaaggcatattttcaccatcaagactaccgcccgctttgggtaactcttctaaaatatgaatcttagaaccttccatttgaccatcccttattaaaaaaaaagctgcagcaagtgaagctagaccagatccgattaagtaagcggatttgttttctacattttcaggttttttagggcgcgcaaatgcttcataatttccataactgtaatacatatccaccaagtcctttcgtattagaatacactcagactatacccctttgtgaattgcaaatattagtatttatattggtaaatttgacgaaattagatcatttttatatttttgatttttaaaattttatcactcgaatgttttttgattctgaggtgcgggacttggaataattcgaatcattatgtggcatgttaaacagctaaatataagctatgtacatttaacaagcggatactcctgacgcaattatagtatcattacatattgtttaatcgtttggggtaatgtaattaaaaggtaaaataggcagagtgttatacataaaatgtaaagaaagaggcgatagaatgtctaaaatcaggtcttttacaatattaagtctacttatttacttagctatgatgtgctatacagtagtgacttattcaaaattaccaaccaaagtacctattcactataatttagcaggggatgctgataactttgctgataaatgggtgctgcttttgattaatagcgcatttatagtgatttggcttatatttttcattgcaggtagatactatgaacgatttgccaaatggtcacattataatcatacaccacgtgaaattcgagcgattaaattatttttaagtacgttaaatttagagattatgagctatatgtctatcttcacagtattagaaatttggcaaatacaacaccatcatcaattcaatttactatggtttaatatgatatttatcattatcattggtttgacgcttgtcatattttgtttacttcctacaattcataaaatgagagattctcaataaaaatataaactgtcatgatgcagttttgaagcggattcctgagattattataaataatatctagtatttataattaaaatgatatattatttattatagttaaatattgtgtatattttgtgaactttttgtaaaaattcgattgcctgtcacatataggagtgttacattttaaatatgtgatcatcgcaaaatataagttgaaataggttgtagattaatcaggatgataaatattttatataaagagagggagtcattatgacactacttactgtaaatccattcgataatgttggattatcagccttagttgcagcagtacctattattttatttttattatgcttaaccgtttttaaaatgaaaggcatttatgcagcattgacaactttggttgttacattgattgtggctttatttgtatttgaattaccagcgcgtgtatcagcaggtgcgattacagaaggcgttgttgccggtattttcccaataggatatatcgttttaatggcagtttggttatataaagtttctattaaaacaggacaattttctattattcaagatagtattgcaagtatttcagaggaccaaagaatccaactattattaattggattttgtttcaacgcatttttagaaggtgcagcaggatttggtgtgccaattgcgatttgtgcagtattattaattcaacttggatttgaaccattaaaagcagcgatgttatgtttaattgctaatggtgcggcgggtgcctttggtgcaattggtttaccagttagtattattgatacgtttaacttaagtggaggcgttacaacattagatgttgcgagatactcagcattaacacttccaattttaaactttattattccatttgttttagtattcattgtagatggtatgaaaggtattaaagaaattttacctgtcattttaacagtgagtggtacatatactggattacaattattattaacaatattccatggtccagaactagcagacattattccatcactagcaacaatggtggtgttagcatttgtttgtcgtaaatttaaaccgaaaaacattttcagattggaagcgtctgaacataaaattcaaaaacgaacgcctaaagaaattgtctttgcttggagtccgttcgtcattttaactgcctttgtattagtatggagtgcaccattcttcaaaaaattattccaacctggaggtgcacttgaaagtttagtaataaaattgccaattccaaatactgtgagtgatttatcgcctaaaggaattgcgttgcgtctcgatttaattggtgcaactgggacagcgattttattaacagtaattattacaattttaattacgaagttaaaatggaaaagtgcaggtgctttattggtcgaagcaattaaagaattatggttaccgatccttacaatttcagctatcctagctattgctaaagttatgacatacggtggtttgactgtagcaattggacaaggtattgctaaagcgggagcaattttcccattattctctccagtattaggttggattggtgtgtttatgactggttcagttgtaaataacaatactttattcgcacctattcaagcgacagtggcacaacaaatttcaacaagcggttcattacttgtggcggctaacactgcaggtggtgtagcagcgaaacttatttcaccacaatcaattgccattgcgactgcagctgttaaaaaagttggtgaagaatctgcattattaaaaatgacgttaaaatacagtattatatttgttgcctttatttgtgtttggacgtttatactaacgttaatattctaaatataaataatgttgtcacttggattcaaatgacattttaaatctaattattcatgaatcgaactagtacgaaatgcaatgagcatcttgtctagttcgattttttaatgtctaaaaatgtcgtatatgtaatcagagtagaaagtgttgaggcgtttcagaagttgtttagaaaagtaagtaaaataaaaaatgcactgagcaacaaaagatgttgctcgtgcatttagatgattcttatcatttcaaataagaatgtgttaatcaacgtatataagttaaaattggtttggataaaatgatatctatcgttgtgtattgtttgtttttatagttcgcgacgacgtccagctaataacgctgcacctaacgctaatgataatccaccaaatacagttgtaccgatgaatggattttcttcaccagtttctggtaatgcttgagctttgttagcatctgcatggtttgctggttgcttcttatcaacaacaagttcttgaccaggtttgatcatgtttttatcagctaatttgttatctgcagcaattttgtcagcagtagtgccgtttgcttttgcaatgtcatttactgtatcaccaggtttaacgacatgtactccgttgccgtcttctttaccaggcttgttgccatcttctttaccaggcttgttgccgtcttctttaccaggtttgttgccatcttctttgccaggttttttgttgtcttctttaccaggtttgttgccgtcttctttgccaggttttttgttgtcttctttaccaggtttgttgccgtcttctttaccaggcttgttgttgtcttctttgccaggcttgttgttgtcttcctcttttggtgcttgagcatcgtttagctttttagcttctgctaaaatttctttgctcactgaaggatcgtctttaaggctttggatgaagccgttacgttgttcttcagttaagttaggtaaatgtaaaatttcatagaaagcattttgttgttctttgttgaatttgttgtcagcttttggtgcttgtgcatcatttagctttttagcttctgctaaaaggttagcgctttggcttgggtcatcttttaagctttggatgaaaccattgcgttgttcttcatttaagttaggtaaatgtaagatttcatagaaagcattttgttgttctttgttgaatttgttatcagctttcggtgcttgagattcatttaactttttagcttctgctaaaaggttagcactttgacttgggtcatcttttaagctttggatgaaaccattgcgttgttcttcgttcaagttaggcatgttcaagatttcatagaaggcgctttgttgatctttgttgaacttattttgttgcgcatcagcttttggagcttgagagtcattaagtttttgagcttcacctaaaacgttagcactttggcttggatcatctttaaggctttggataaaaccattacgttgatcagcgtttaagttaggcatatttaacacttgataaaaagcattttgttgagcttcatcgtgttgcgcagcatttgcagcaggtgttacgccaccagatataagtaatgtacctaaagttacagatgcaatacctacacctagtttacgaattgaataaatgtttttctttttcaaattaataccccctgtatgtatttgtaaagtcatcataatataacgaattatgtattgcaatactaaaatctatatttataattaaatttaaaggtaagttttacaacttataaaataaaaattttgtccaaagatttattcaggaagtaaaaggcttaaaaccgcaaaatcacgctattccgattaataaaaacagataaaatatatagatattttttataatgaaagcggtttattacatatgagttaaaaaatatttttaagaataaaatggaattttgaatgtgctgaggtttaatttcggaaatggttttaagagatatagaaaatagaaagttgttcataatgtgctgaggttttattaaaaaatagaaaacacaagtgcactttagaatacagcacacttgcgtaatagagatattattcaaaaacaagatgtaaatgatttttatctgccaataattgattcacttgagctaataattgttcagcatggtcttgctgcgcgtcattcatatgaattaaaatttttctttcatcttcagttgagcgttcttttattagatagccttgcttttttaaattattgagagctctaacagtttgagggtatttatggtggattgtttcaattaaatctttaagaagaacgatgtttttattttgagaagtgataatagctagaattgtgaattctacaaaacttaatgttagatgctttttgataatattcttgaaatacattgtatacatcatcaagtttagaaattctttactatcttttggtatcatctgtgattcactttgatctgcaagattaaattgtttaatgatttgatcaaacaatgtaacacgttctgcaattttctctcgttgttcttcagatattgaaatgtaagtattacgctcatcaattttacttcgaactttactaatatatgaatgtttcacaagtacttttatatgctgtactaaatccgattgtttataacataaatctgaaacaatcttcttaaatggaagtgtgttttcttgctgatgaaataaataagtcagtaatataaattcttttatagtcatatcgacttcaggcttgacttttttcttaaaacgaaacatatatgcttcaatgattataaaatctctaattttgtcatggttattatatttcattgttctatctccttgtatatgcactttattttaatataacacaatataataagaaaaataatccataatttacaattaaaaataatatgatatttttattgaaatttgtgtttttgaataaatgacattatcaaacactatatttaaataagaaatagttatcgatatttgaaaaatcgaagaatattgattgatattatagaatatgagtcggtgttatttgtatataaagtattaatatgtaattaagaaagtcgacgcttgttaacattaacaacaactatatgtataaaaaaacctcgcaactgttagttagctgaatcattttgctaacgttgttgtgaggtcattttgttttaataatatctttataactttttcacggttaataataagtatatgaagaatggtgcaccaaacgcagcaatgaatacacctgccggcacttctttaggcaagaatagggtgcgtccaattaagtctgcgataacaattgatatggcaccaatcattgctgacattagtaactttttagcataacttccgcgaacgattgttttcgcgatgtgtggtgcaattaaaccgacaaacccaatatttcctactaaactgattgccatagatacgagtattgtagaagagattaattgaatcagcttcatacgttgtacatgtaaacctaagccaatcgctacagggtcatcaagtatagatattttcattttaggtataacaagaaataacaacggaataacagctacgattaccatacccaaaatgaatgtatctttaaacgttgcaccgtaaagacttccgactaaccaagtataagctttggctgcagatagttgctttgttgtaataagtagcccttgtacaagtgcaataaataatgtttgcattgaaataccgatgattatgagtgttgtcggtcgaatgtgacctttcgtttgaaacactaatagaatcaccattgcaattgcgccacctaatacagcaaatagaggaagtaaatgtatcgttaaatggctgaaaaatgcaataaagacaacagcacttaagctagcaccacctgtgattccgataatatctggtgaggcaattggatttttcaagacattttgtaacattaaaccgctcatccctagtgctgcaccagctaatatcgcaagtgtaatgcgaggtaagcgtaatacttctaaagtgaattgatctatactgtcatttggatttataaagtacatcagtacgcgttgtaatggtataaagcttgaaccaaccatcatacttaccactgaaacgatggctaaaaagattaacgcgaagatgagatggtaattgtcctttttattaatcttttcggtcataagcgttgacgtcctttcttcataagatagattaagacaatagcgccaatgacagcggtaacgacaccgataggcaactctagtggcttaataataatacgagcaacaatgtctgagataatcattaggattgcgccggttaatgcagtaaaaggaattaaatacttatagtttggtggtaataatcgtttactaatattcggtacaataagtcctacaaagacgattgatccagctacagcaaccgagatgcctgctagcatactaatgagcattataatcatccatttgattaattttatgttttgtccgagtccagtggcaatgtcgtcacttgtcatcaagatgttgatgtgtgcagccatgctaaatgcaattaaaataagtatcaatacaagcggaataatccatgggatatcccaaatgttacgtaatgaaacggagccactcaaccagaataataggccttgtaagtctgtttcattcataatgagaatgccttgagtaaaagctgtaaataacatcgcaatcgcggcacccgctaaaatgacacggtgaggtgaaaatagggtttgtctaaacatccctagtgcaacgactaagactgtaacaacaatagcacccaaaaacgcgatgacaacaatcattttaaaagattgaatttggataaatgtaatactaaagatgacaaaaaatactgcgcctgcattgacaccgaaaagccccggcgatgctattgggtttcgtgtaagtgcttgcatcaacaaacctgagactgctagtgcggcgcctgtcaatagcgcaatgattgttctcgacgcccgtgcaccagtgacaacatcatgtaaatcgttttcactatcaaagttgaataacgcctgtatcaccgtacctggtgacacaagcgtatttccaatcattaaacttaagatagctactattgcaagacataaaccagcaataacgatttggtattttggtttaagtagcatcgtaaaactccttaattattttgattgtttttcaatatttaacttttcatataaatcgtcaataagttttaatgatgatttatatccgccagctaagttccaagtgatttcatctaaatcatcagatacttggttgtttttaactgcgtctaaatttttccactctttacttgaagtccattcgctttcagtctttttaactaatgcagcatctttcgcatttggatctgattttactacaaaaatatgatcagcgttcattaatggaatgctttctttagatgtaagttggataatatctttaccattatcaacttgtttttgtaagtctttattacgtttgaatcctaaatcatttaagatttcaccagcatatccaccagcataaattcttgtatgatcagcacggaagttaacaactgaagctttcaatggccatgcatctttatactttgcttttgcatctttttggaatgcagctactttatcatcgtactttttaagtaaatcttcagcttctttttctttccctaaagctttccccattaacttagttgtatctttgaatttgaaaactgtatcagtagaaactgttggtgcgattttagataattgatcgtaaactttttcatttctaacttttgacgcgacaattaagtccggttttaatttagagatttcttctaagttaggtgcaggttcttgacctacaatcttagtatcttttaaatcattttttatgtattcgaatttcggtttttgtgtccatgattctacagcacctacaggtttaacacctaaagatacagcgacgtcagtggcaccttgatatagtgtaacaacgcgctttggtttccctttaatttcagttgtacccattgcatgtttaattgaagttgtttccttatctttgctatcagatgattgcttatttgaattcccactacatcctgctaaaacaagtaggaaagcaagcgtaacaacaagcattttaattactttattcattgactaattagcctccttcgtgatgtatgacaatgagaatcattatcacggtttagtatgaattaaattttttcctaagtcaataaaatatttatgatttacatgcaacttataattatttgacatataaatgcataaaaaatataatcctaattacttgatagtgagaatcattatcaattaggtaacacacaatattatagaattttaaatttgaggaggaagcgcttttgattgaaaaaagtcaagcatgtcacgattcattgttagattctgtagggcaaacacctatggttcaacttcatcaactatttccgaaacatgaagtgtttgcaaagttagagtatatgaatcctggaggcagcatgaaagatcgacctgccaagtacatcattgaacatggtattaaacatggtttaatcactgagaatacacatttaattgaaagtacttctggtaatttaggcattgcgttggcaatgatagctaaaatcaagggattaaaactcacgtgtgttgttgatcctaaaatatcaccaacaaatttgaaaattattaaaagttatggtgccaatgtagaaatggttgaagaacctgatgcacatgggggttatttaatgactcgtattgcaaaggtgcaagaactgttagccactattgacgatgcatattggattaatcaatatgcgaatgagttaaattggcaatcccattatcatggtgcaggcacagagattgttgaaacaattaagcaacctatagattattttgtcgcgccagtcagcacgacaggtagcattatgggtatgagtagaaaaattaaagaagtgcatccaaacgcacaaattgttgctgttgatgcgaaagggtcagtcatttttggtgacaaacctattaatagagaattacctggtatcggtgctagtcgtgtacccgaaatattgaatagatcagaaattaatcaagtgatccatgtagatgattatcaatctgctttgggctgtcgaaaactgattgattatgaaggtatatttgctggaggttcaacaggttcgattattgcagcgattgagcagttgataacgtcaattgaagaaggtgcaacaattgtcacgattttaccagatcgaggcgatcgttacttagatttagtttattcagatacatggttagaaaaaatgaaatcaagacaaggagttaaatcagaatgaatagagagatgttgtatttaaatagatcagatattgaacaagcgggaggaaatcattcacaagtttatgttgacgcattaacagaagcattaacagcgcatgcgcacaatgattttgtacaaccgcttaagccgtatttaagacaggatcctgaaaatggacacatcgcagatcgaattattgcaatgccaagtcatatcggtggtgaacacgcaatttcaggtattaagtggataggtagtaagcacgacaatccatcgaaacgtaatatggagcgtgcaagtggtgtcattattttgaatgatccagaaacgaattatccaattgcagttatggaagcaagtttgattagtagtatgcgtactgcagcagtttcagtgattgcagctaagcatttggctaaaaaaggatttaaagacttaacaatcattggttgcgggctaatcggagacaagcaattacaaagtatgttagagcaattcgatcatattgaacgcgtttttgtttacgatcaattctctgaagcgtgtgcacgctttgttgatagatggcaacaacagcgtccggaaattaattttattgcgacagaaaatgctaaagaagcagtatcaaatggtgaagtagtcattacatgtaccgtaacggatcaaccatatattgaatatgattggttacaaaagggtgcatttattagcaacatttctatcatggatgtgcataaagaagtctttattaaagctgacaaagtcgtagtagatgactggtcacaatgtaatcgagaaaagaaaactattaaccaattggtgttagaaggtaaattcagcaaagaagcacttcatgctgaactagggcaacttgtgacaggtgacacaccaggacgtgaagacgatgatgaaatcatattacttaatccgatgggtatggctatcgaagatatttcaagtgcttactttatttatcaacaggcacaacaacaaaatattgggacaacattgaacctatattaagaatgcgaggtgtctgaacattgcagaatcatacagcagtcaatacagcacaaacgataatattaagggatttagttgatgcattattatttgaagatatagccggtattgtatcgaatagtgagattactaaagaaaatggacaaaccattttgatatacaaacgtgaaacacaacaaataaagatacctgtttattttagtgctttaaatatgtttcgttatgaaagttcacaaccaattacgatagagggaagggcgtctaagcaacctttaacggcagctgaattttggcaaacaatcgctaatatgaattgtgatttaagtcatgaatgggaagtggctcgcgttgaagaaggactgactactgctgccacacagcttgctaaacaattatcagaattagatttagcgtcgcatccttttgtgatgtccgaacagtttgcaagtttaaaagatcgtccatttcatccattagctaaagaaaaaagaggattaagagaagcggattatcaagtgtatcaagctgaattaaatcaatcatttcctttaatggttgcagcagttaaaaagacacaaatgattcatggcgatactgcaaatattgatgaattagaatcattgacagcacctataaaagaacaagcgacagatatgttacatgatcaagggttatcaatagatgactatgtactatttcctgtacatccttggcaatatcaacatattttgccgaacgtctttgcgaaagagattagggaaaaattggttgtaccattaccattaaaatttggagattatctatcggcttcaagtatgcgttcattaattaatatcgcagcgccgtataaccatgttaaagtgccatttgcaatgcagtcattaggcgcattaaggctaacgcctacgcgttacatgaaaaacggagaacaagccgaacgattattacgtcaacttatagaaaaagatgccatgttagctaagtatgtcacagtttgtgatgaaacagcttggtggtcatatatgggtcaagataatgatattttcaaagatcaattaggtcatttaactgttcagctaagaaaatatcccgaagtgctagccaaaaatgatacgcaacagctagtgtcaatggcagcactcgcggcaaatgatcgcaccttatatcaaatgatttgtggaaaagataatatttctaaaaaagatgtcatgacgttatttgaagatatcgcacaagtctttttaaaggtaacactatcatttatgcaatacggcgcattaccagagttgcatggtcaaaatatattgttgtcatttgaagatggacgtgtacaaaaatgcgtgttacgtgatcatgatactgtcagaatttataaaccatggctaacagcacatcagctttcattgccgaagtatgtcgtcagagaagatacacctaatacgctaattaatgaagatttggaaacattctttgcttattttcaaacattagctgtatcggtaaatctatatgccattattgatgcaattcaagatttatttggtgtaagtgagcatgaacttatgtcgttgttaaaacaaattttaaaaaatgaagtggcaactatttcctgggttacaactgatcagctagctgtcagacatattttatttgataaacagacgtggccatttaaacaaattttattaccattgctatatcaacgtgatagtggtggaggtagtatgccttcaggtttaactaccgtaccaaatccaatggtgacatatgattaatcagtctatatggcgcagtaactttcgcattttatggctcagtcagtttatagcgattgctggactgacagtacttgtgccattattgccaatttatatggcatcactacaaaatctatcagtcgtagaaatacagttgtggagtggtatagcgattgctgctccagctgtaacgacgatgatagcttcgccgatatgggggaagctaggtgataagatcagtcgaaaatggatggtgctacgagcgttacttggtttggcggtatgtttatttttaatggcattgtgtactacaccattacagtttgtacttgtgaggttattgcagggactatttggtggtgttgttgatgcatcaagtgcgtttgcgagtgcagaggcgccagctgaagatcgtggaaaggtattaggaagactgcaaagttcagtcagcgcagggtctcttgtgggaccattaattggcggtgttacagcttcgatattaggttttagtgcgttactgatgagtattgccgttattacttttattgtctgtattttcggtgcattaaaattgattgaaacgacacatatgccaaaatcacaaacaccaaatattaataaaggtattcgccgttcatttcaatgtctattatgcacacaacaaacatgtcgatttattatcgttggcgttttagcaaactttgctatgtatggcatgctaactgcattatcaccacttgcttcatcagtgaatcatacagcgatagatgaccgtagtgtgattggatttttacagtccgcattttggacggcttcgatattaagcgcgcctttatggggtcgctttaatgataaatcatatgttaaatcagtatatatatttgccacgattgcatgtggttgtagtgcgatactgcaaggtttagcgacgaatgtagaatttttaatggctgcaagaatacttcaaggattaacatatagtgcattgattcaaagtgtcatgtttgtcgtcgtgaatgcgtgtcatcaacaacttaaaggcacatttgttggtacgacaaatagtatgttagttattggtcaaattattggtagtcttagtggcgctgccattacaagttatactacaccagctactacgtttatcgttatgggcatagtatttgctgtaagtagtttatttttaatttgttcaaccatcactaatcaaatcaacgatcacacattaatgaaattatgggagttgaaacaaaaaagtgcaaaataaagaattaatacaacatgcagcgtatgcggctatcgaacgtattttaaatgaatattttagagaagaaaatttatatcaagtaccacctcaaaatcatcaatggtctatacaattatctgagctcgaaacgttaacaggtcaattcgcttattggtctgcgatggggcatcatatgtatcatccagaagtatggcttattgatggtaaaagtaagaaattaacaacatataaagaagccattgcgcgtattttgcaacatatggctcaaagtgcagataatcaaacggcagtgcaacaacatatggcgcaaattatgtctgacatcgataatagcattcatcgcacggcgcgttatttgcaaagtaacacaatagactacgcagaggatcgctatatcgtttcagaacaatctttatatttaggtcatccatttcatccgactcctaagagtgcaagtgggttttcagaagcagatttagagaaatatgcacccgaatgtcatacatcattccaattgcattatttagctgtgcatcaagatgttctgctcacgcgctatgtagaaggtaaagaagatcaggttgagaaagtgttgtatcaattagcagatatagacatatcagagatacccaaagattttattttattaccaatacatccttatcaaatcaatgtgttgcgacagcatccacagtatatgcaatatagtgaacaaggtttgataaaagaccttggcgtttccggtgattcagtgtacccgacgtcttcggttagaactgtattttcaaaagcattaaacatttatttgaaattaccgatacacgttaaaatcactaattttatacgtacgaatgaccttgaacagattgaacggacaattgatgccgcgcaagttatcgcatcagtcaaagatgaggttgaaacaccccattttaaattgatgtttgaagaaggatatcgtgcattgttaccgaatccattagggcaaacagttgaacctgaaatggatttattaacaaatagtgccatgattgttcgtgaagggataccgaattaccatgctgataaagatattcatgtattggcgtcattatttgaaacgatgcctgattcaccgacctctaagttatcacaagtgattgagcaaagtggtttagcaccagaagcatggcttgaatgttatttggatcgtacattattgccgatattaaagctgtttagtaacacaggcattagtctagaagcacatgtacaaaatacattaattgaattaaaagatggcataccagaagtgtgctatgtcagagatttagaaggtatttgtctatctagaacgattgctactgaaaaacagcttgtgccaaatgttgttgcagcatctagccctgttgtatatgcacatgatgaagcgtggcatcgtcttaaatattacgttgtagtaaatcacttaggacatttagtatcaactattggtaaagcgactagaaatgaagttgtgttatggaaacttgtagcgcatcgtcttatgacttggaaaaaagaatatgcgaataacgcagtatttattgactgtgtagaagatttatatcaaacgccgaccattgcggctaaagcgaatttgatgagtaaattgaatgattgtggtgcaaaccctatttatacacatataccaaatccaatttgtcataacaaggaggtatcgtattgtgaatcaaacaattcttaatcgtgtaaagactagagtgatgtaccaattggtatcatcgcttatttatgagaatattgttgtgtataaagcgtcatatcaagatggtgtcggttattttacaatagaaggaaatgattcagagtatcgttttactgctgaaaagacacatagctttgatcgtatacgtatcacatcaccaattgagcgtgtcgtaggagatgaggcagatacaacaacagactatacacaattactgagagaggttgtatttacatttcctaaaaatgatgaaaagctagaacaatttattgtcgagttattacagacagaactaaaagatacgcaaagtatgcagtatcgagaatcaaacccaccagcaacacctgagacatttaacgactatgaattttatgcgatggaagggcatcagtatcatccaagttacaaatcacgtttaggatttacgttgagtgataatttgaaatttggtcctgactttgtaccaaacgttaaactgcagtggttagctatcgacaaagataaagtagaaacgacggtatcaagaaatgttgtagttaacgaaatgttacgtcaacaagttggcgataagacttatgaacattttgtacagcaaattgaagcgtctggcaaacatgtaaatgatgttgagatgatacctgtacacccatggcagtttgaacatgtcattcaagttgatttggctgaagaaaggcttaatggcacagtactatggttaggggaaagtgatgagctatatcaccctcaacaatcgattcgtacgatgtcgccaatagacacgacaaaatattatttaaaggtaccaataagtataacgaatacttcaacgaaacgagtgttggcgcctcatacaattgaaaatgcagcgcaaattacggattggttaaagcagatacagcaacaagatacgtatttaaaagatgaattaaagacagcttttctaggggaagtcttaggacagtcttatttaaatacacaactttcgccttataaacaaactcaagtttatggtgcgttaggtgttatatggcgtgaaaatatatatcatatgttaatcgatgaagaggatgcgataccatttaatgcactttatgcgagtgataaggatggtgtaccattcattgaaaattggattaaacaatatggttctgaagcttggacaaagcaatttttagctgtagcgattcgtccaatgattcatatgctttattatcacggtattgcctttgaatcgcatgcacaaaatatgatgctcattcatgaaaatggttggcctacacgtattgccttaaaagatttccatgatggtgttcgttttaagcgtgagcatttaagtgaagctgcttcacacctgacattaaagccaatgccagaagcacataaaaaagtgaatagtaattcatttattgaaacagatgatgaacgtttagtacgtgactttttacatgatgcatttttctttattaatatcgccgaaatcatcttatttattgaaaagcaatatggtatcgatgagaagctgcaatggaaatgggttaaaggcatcattgaggcgtatcaagaagcatttccagagctgaataactatcaacattttgatttgtttgaacctacgattcaagttgaaaagttaacgacacgtcgattattaagtgactccgagttaagaattcatcatgttacaaatccattaggtgtaggaggtattactgatgcaacaactatctctgaaacatagattaaacaatggtgattcagtttatggcatttttaattctataccggacccattgatgatagaggttatcgcagcaagcgggtatgactttgttgtgattgatacagaacacgtggcgattaatgatgagacactagcgcatttaattcgtgcagctgaagcagcgcatattataccaattgtacgtgtcactgcagtgatagatagagatatcattaaagtgttggatatgggtgcgagaggtattattgtgccacacgttaaagatcgtgagacagttgagcatattgtgaaattaagtcgttattacccgcaaggattaagaagtttgaatggtggtcgcatggcaagatttggacgtacaccattacttgatgcaatggagatggctaatgagcatattatggtgattgccatgatagaagatgttgaaggggttatggccattgacgatatagcacaagtcgaaggtttagacatgatagtcgaaggtgccgcagatttatcccagtcacttggcataccatggcaaacgcgtgatgatcaagtaacatcacatgttcaacatatttttgaagttgtgaatgcacatggtaaacatttttgtgcattaccacgtgaagatgaagatattgcaaaatggcaggcacaaggtgtacaaacatttattttaggtgatgatcgcggaaaaatatatcgccatttaagtgcatctctagcgacgtctaaacagaagggggatgaagactaatgcgtatagttcaacctgttattgaacagttaaaagcacaatctcatccagtttgtcattatatctatgatttagtcggactggaacatcatttgcaacatattacatcgtcattgcctagtaattgtcagatgtactatgcaatgaaagcaaatagtgaacgaacaatcctagatacaattagtcagtatgttgaaggattcgaagttgcatctcaaggtgaaatagcaaaaggtcttgtttttaaaccagcaaatcatattatttttggtggccctggtaagacagacgaggaactaagatatgcagtaagtgaaggtgttcagcgtattcatgttgaaagtatgcatgaattacaacggctaaatgccatcttagaagatgaagataagacacaacacattttattgcgtgttaatttagcaggaccatttcccaatgcaacgttgcatatggcaggacgcccaacacaatttggtatttctgaagacgaagttgatgatgtcattgaagctgcgctagcaatgccaaatattcatctagatggatttcattttcattctatttctaacaatttagactcgaatttacatgtcgatgtagtgaaactttattttaaaaaagcaaaggcatggtctgaaaaacatcaatttcctctcaaacatatcaatcttggtggtggcataggcgttaactatgcagatttaactagccaatttgagtgggataattttgtagaaaattttaaaacacttatcgttgagcaagaaatggaagatgtgacattgaactttgaatgtgggcgctttattgtggcacatattggttactatgtgacagaagtgctagacattaagaaagtacatggtgcttggtatgccattttaagaggaggtacgcaacaatttagactgccggtatcttggcagcataaccatccttttgacatttatcgctataaggacaatccatattcatttgaaaaagtttcaatttcgagacaggacacaacgttagtcggtcaattatgtacaccgaaagatgtctttgctagagaaatacagatagaggcaatcagtacaggcgacgttattgttttcaaatatgcaggtgcatacggatggtctatttcacatcacgatttcttaagccatccacatcctgaatttatttatttaacgcaaacaaaggaggatgaataactattgaatcatattcatgaacatttaaaattggtaccagtagataagattgatcttcacgaaacattcgaacctttaagattggaaaaaacgaaaagtagtattgaagcagatgattttatacgtcatcctattttagtgacagcgatgcaacatggtagatatatggttatagatggtgtgcatcggtatacaagtttgaaagcgttaggatgtaagaaagttccagtgcaagaaatccatgaaacacaatattcaattagtacatggcaacataaagttccatttggtgtgtggtgggaaacgttacaacaagaacatcgcttaccatggactactgagacaagacaagaagcgccatttattacgatgtgtcatggtgatacagaacaatatttgtatacaaaagatttaggcgaagcacattttcaagtatgggaaaaggttgtcgcaagttatagtggttgttgttctgtagagagaattgcacaaggtacatatccttgtctttctcaacaagatgtactcatgaagtatcagccattgagttataaggaaattgaagcggttgttcataaaggggaaactgtgccagcaggtgtgacacgctttaatatttcaggacgatgtcttaatcttcaagtaccactggcattacttaaacaagatgatgatgttgaacaactgcgcaattggaagcagtttttagcagataagtttgccaatatgagatgttatactgaaaaagtatacttggtggagcaatagttttactgtgatgttgagggaaatatgatgatttagcctattaatagcgaaaatataataaaacaatatagtgtggagaacttttgatattttataaatattgaagttctccatttttgtattttgcatataaaaattaaataaaataaggtatattaaggtaaagtataaatattaaataaatggggaatagacatggaaaaaaatgtagaaaaatcattcataaagataggtttatattttcaaatagcttatatagtactcatggctataactttatgtgggtttgtaatttgctatggactaattttcggccttttctatttattgtcaggtagcagagctgattatttaatagtaacgatagttatatcggcaataatttctatatttgtaattatactttcaatcgtacctgtcatcgtattggcatctgacttatttaaagaaaggatttcaaatggtgtcatattaattgtattggctattatcgctttagtattatgcaactttgtatctgcaatactctggtttgtttcagccatatctattttaggtagaaaaaaattagtatctacatcagatactaccactattcaaaaaagtaaagggaacgcaaatcaagcatcacataaagacacgtgtaaaaaggaacttgatagtcaagacatgatggaacatcctgagtttaaaaatcccacgactaaaaacctagaaggattaaacgaagaagtacataaagatgaagctacaactaaagttgacagtgataatacggaaccgccgattgaatcaaaagaccatgtctcgaaaaaagattgatgacaaactaatcgagagacttaaaaaataatattcaacataaacacttttaaaacgacatttaaacgcattgccaatcactaaaggtagtgcgtttaactataccttaaatatctgaatattttgttaaatggagttacctttgttgtactattcaaatgaagaggagtaaaatgtaattaaaggaaagtaatttgaggagtgatctttatgacaaacaacaaagtagcattagtaactggcggagcacaagggattggttttaaaattgcagaacgtttagtggaagatggtttcaaagtagcagttgttgatttcaatgaagaaggggcaaaagcagctgcacttaaattatcaagtgatggtacaaaagctattgctatcaaagcagatgtatcaaaccgtgatgatgtatttaatgcagtaagacaaactgcagcgcaatttggcgatttccatgtcatggttaacaatgccggccttggaccaacaacaccaatcgatacaattactgaagaacagtttaaaacagtatatggcgtgaacgttgcaggtgtgctatggggtattcaagccgcacatgaacaatttaaaaaattcaatcatggcggtaaaattatcaatgcaacatctcaagcaggcgttgagggtaacccaggcttgtctttatattgcagtacaaaattcgcagtgcgaggtttaacacaagtagccgcacaagatttagcgtctgaaggtattactgtgaatgccttcgcacctggtatcgttcaaacaccaatgatggaaagtatcgcagtggcaacagccgaagaagcgggtaaacctgaagcatggggttgggaacaatttacaagtcagattgctttgggcagagtttcacaacccgaagatgtttcaaatgtagtgagcttcttagctggtaaagactctgattacattactggacaaacaattattgtagatggtggtatgagattccgttaataatcatccattaataataaataaatccttattgttaagtttaatcacttagcagtaaggattttttagtgcacttagaagggattgtattagtagaaaattaataacagaagctcttaagtgagttatgatgtcacagtctaatgcatcagttgaaagcattactaaattctatcaagcatagttacgctaaaacatcataaaacaccactatctaatttatctacataaaaattcacaaagttatcgcattttatttttataaataaaaaatatctataaaaagcttacaatactttatgtttttgtgatatatttttaatgtataaatgaggtggaagatttggaaaaagttttgataactggtggggctggttttattgggtcacatttagtagatgatttgcaacaagattatgatgtttatgttctagataactatagaacaggtaaacgagaaaatattaaaagtttggctgacgatcatgtgtttgaattagatattcgtgaatatgatgcagttgaacaaatcatgaagacatatcaatttgattatgttattcatttagcagcattagttagtgtcgctgagtcggttgagaaacctatcttatctcaagaaataaacgtcgtagcaacgttgaaattattagaaaccattaaaaaatataacagtcatataaaacgattcatctttgcatcatctgcagccgtttatggtgatttacctgatttacctaaaagtgatcaatcattaattctaccattatcaccatatgcaatagataaatattacggcgaacgtacgacattaaattattgctcgctatataacattccaacagctgttgttaaattctttaatgtatttgggccaaggcaagatcctaagtctcaatattcaggtgtgatttcaaaaatgttcgattcatttgaacataacaagccttttacattttttggcgatggtctgcaaacgagagactttgtttatgtttatgatgttgttcaatctgtgcgcttaattatggagcataaagatgcggttggacatggttataacattggtacgggtacatttacgaatttgctagaggtttatcgcattattggtgaattatatggaaaatcagtcgagcatgattttaaagaagcaagaaagggagatattaagcattcttatgcagatatttctaatttaaaagcattaggatttgttcctaaatacactgtggaaacaggcttaaaggattactttaattttgaggtagataatattgaagaagttacagcgaaagaagtggaaatgtcgtgaaattggcattgaagctgtccataataagggttacgcctatcaaagaaaattagacacactagaagaagtaaaaaagggctattttccaatcaaacgtgcgattgacttggtattaagtatcgttttattatttttaacatttccgattatgttcatattcgccattgctatcgtcatagattcgccaggaaaccctatttatagtcaggttagagttgggaagatgggtaaattaattaaaatatacaaattacgttcgatgtgtaaaaacgcagagaaaaacggtgcgcaatgggctgataaagatgatgatcgtataacaaatgtcgggaagtttattcgtaaaacacgcattgatgaattaccacaactaattaatgttgttaaaggggaaatgagttttattggaccacgcccggaacgtccagaatttgtagaattatttagttcagaaataataggatttgagcaaagatgtcttgttacaccaggattaacaggtcttgcgcaaattcaaggtggatatgacttaacaccacaacaaaaattaaaatatgacatgaaatatatacataaaggtagcttaatgatggaattatatatatcaattagaacattgatggttgttattacaggggaaggctcaaggtagtcttaatttgcttaataagtttaaataaaagttacattttaaagattgtgaccaattgttacagtataacgaggaatcccttgagacagtatcaaatggcattaagaaatatttgccatcattgatttgcatggctataaatactattcatctgatgagatagccatgttaagaaattgaaagtatagcattaaaggggtttgtaacagttgaaaattatatattgtattactaaagcagataatggtggtgcacaaacacatctcattcaactcgctaaccatttttgcgtacaccatgatgtttatgtcattgtaggcaatcatggaccaatgattgaacaactagatgcaagagtcaatgtaattattatcgaacatttagtaggtccaattgactttaaacaagatattttagctgtcaaagtgttagcacagttattctcgaaaattaaacctgatgttatccatctacattcttccaaagctggaacggtcggacgaattgcgaagttcatttcgaaatcgaaagacacacgtgtagtttttactgcgcatggatgggcttttacagagggtgttaaaccagctaaaaaatttctatatctagttattgaaaaattaatgtcacgtattacagatagcattatttgtgtttcagatttcgataaacagttagcgttaaaatatcgatttaatcgattgaaattaaccactatacataatggaattgcagatgttcccgctgttaagcaaacgctaaaaagccaatcacataacaatattggcgaagttgttggaatgttgcctaataaacaagatttacagattaatgactcgacaaaacatcaatttgttatgattgcaagatttgcttatccaaaattgccacaaaatctaatcgcggcaatagagatattgaaattacataacagtaatcatgcgcattttacatttataggcgatggacctacattaaatgattgtcagcaacaagttgtacaagctgggttagaaaatgatgtcacatttttgggcaatgtcattaatgcgagtcatttattatcacaatacgatacgtttattttaataagtaagcatgaaggtttgccaattagcattatcgaagcgatggctacagggttgcctgtcatcgctagtcatgttggtggcatttcggaattagtaactgataatggtatatgtatagtgaacaatcaacctgaaactattgccaaagtcctggaaaaatatttaatagacagtgattacatcaaaatgagtaaccaatctagaaaacgttatttagaatgttttacagaggagaaaatgattaaagaagtggaagacgtttataatggaaaatcaacacaatagtaaatatctaacattgttacttatcggtttagcggtttttattcagcaatcttcggttattgccggtgtgaatgtttctatagctgactttatcacattactaatattagtttatttactgtttttcgccaaccatttattaaaggcaaatcattttttacagtttttcattattttgtatacatatcgtatgattattacgctttgtttactattttttgatgatttgatatttattacggttaaggaagttcttgcatctacagttaaatatgcatttgtagtcatttatttctatttagggatgatcatctttaagttaggtaatagcaaaaaagtgatcgttacctcttatattataagcagtgtgactataggtctattttgtattatagctggtttgaacaagtcccctttactaatgaaattattatactttgatgaaatacgttcaaaaggattaatgaatgaccctaactatttcgcgatgacacagattattacattggtacttgcttacaagtatattcataattacatattcaaggtccttgcatgtggtattttgctatggtctttaactacaacggggtctaagactgcgtttatcatattaatcgtcttagccatttatttctttattaaaaagttatttagtagaaatgcagtaagtgttgtgagtatgttagtgattatgttaattctactttgttttaccttttataatataaactactatttattccaattaagcgaccttgatgccttaccgtcattagatcgaatggcgtctatttttgaagaggggtttgcatcattaaatgatagtggatctgagcgaagtgttgtatggataaatgccatttcagtaattaaatatacattaggttttggtgttggcttagtggattatgtacatattggctcgcaaattaatggtattttacttgttgcccataatacatatttgcaaatttttgcggaatggggcattttattcggtgcgttatttatcatatttatgatttatttattatttgaattatttagattcaatatttctgggaaaaatgtaacagcaattgttgtaatgttgacgatgctgatttactttttaacagtatcgtttaataactcaagatatgtcgcttttattttaggaattatcgtctttattgttcaatatgaaaagatggaaagggatcgtaatgaagagtgattcactaaaagaaaatattatttatcaagggctataccaattgattagaacgatgacaccgctgattacaatacccattatttcacgtgcatttggtcccagtggtgtgggtattgtttcattttctttcaatatcgtgcaatactttttgatgattgcaagtgttggcgttcagttatattttaatagagttatcgcgaagtccgttaacgacaaacggcaattgtctcagcagttttgggatatctttgtcagtaaattatttttagcgttaacagtttttgcgatgtatatggtcgtaattactatatttatagatgattactatcttattttcctactacaaggaatctatattataggtgcagcactcgatatttcatggttttatgctggaactgaaaagtttaaaatacctagccttagtaatattgttgcgtctgttattgtattaagtgtcgttgttatctttgtgaaagatcaatcagatttatcattgtatgtatttactattgctattgtgacagtattaaaccaattacctttgtttatctatttaaaacgatacattagctttgtttcggttaattggatacacgtctggcaattgtttcgttcgtcattagcatatttattaccaaatggtcaactcaacttatacactagtatttcttgcgttgttcttggtttagtaggcacataccaacaagttggtatcttttctaacgcatttaatattttaacggtcgcaattataatgattaatacatttgatcttgtaatgattccgcgtattactaaaatgtgtatccagcaatcacatagtttaactaaaacgttagctaataatatgaatattcaattgatattaacaatacctatggtctttggtttgattgcaattatgccatcattttatttatggttctttggtgaggaattcgcatcaactgtcccattgatgaccattttagcgatacttgtattaatcattcctttaaatatgttgataagcaggcaatatttattaatagtgaataaaataagattatataatgcgtcaatcactattggtgcggtaatgaatttagtattatgtcttgttttgatatatttttatggaatttacggtgctgctattgcgcgtttaattacagagtttttcttgctcatttggcgatttattgatattactaaaatcaatgtgaagttgaatattgtaagtacgattcaatgtgtcattgctgccgttatgatgtttattgtgcttggtgtggtcaatcattatttgcctcctacaatgtacgctacgctgctattaattgcgattggtatagtagtttatcttttattaatgatgactatgaaaaatcaatacgtatggcaaatattgaggcatcttcgacacaaaacaatttaagtatcggtaacgctatactttagaaatttaagaataagaagaaaaggcaatttcttattgaaaaatggaagttgtcttttttaattctctttaaaagcgggaaacaaaagcagttaaatgcctttttgcattcaatattaaatattatatcaatttcgaatatttaaattttatataattggatataacaaataaataataattattgcaaaacacacccgaaattaattattataaaagtatattcataaaaggaggaatatacttatggcatttaaattaccaaatttaccatatgcatatgatgcattggaaccatatatagatcaaagaacaatggagtttcatcacgacaaacatcacaatacgtacgtgacgaaattaaacgcaacagttgaaggaacagagttagagcatcaatcactagcagatatgattgctaacttagacaaggtaccggaagcgatgaggatgtcagtccgtaataatggcggtggtcattttaaccattcattattctgggaaatactatcacctaattctgaagaaaaaggtggcgtaatagacgacattaaagcgcagtggggcactttagatgaatttaaaaatgaatttgcaaataaagcaacaacattatttggatcaggttggacttggttagttgttaatgatggaaaattagaaattgtgacaacgccaaaccaagataatccattaacagaaggcaaaacaccaatcttactatttgatgtttgggagcatgcctactatctgaaatatcaaaataaacgtccagactatatgactgcattttggaatattgttaactggaaaaaagttgatgaattataccaagcagcaaaataatataacttaatataattgaggtggagcatctattaggtgtttcaccttttttgtacttaatatctttacttattcgtttttgtgtaatgggatagcgcgtaaaagtggcaaaataataagataaatttcaactcgaaataccttattattgttgactataacgatgacttaaatgctatatacatcagacaacactattgattaatcaacatattgacattaaataaattgacaaaataagtaattattgtgaatctaaagtgaaatttttataaaaaattgtaatgattcaaaaattttgttgcatttcttttgtaatcatatgataatataaatgtaatcaaattgtaatataaggggaaaagacaatgaaaaaattagcaacagtaggttctttaattgtaacaagcactttagtattctcaagtatgccttttcaaaatgcgcatgctgacacaacttcaatgaatgtgtcgaataaacaaagccaaaatgtacaaaatcatcgcccttatggcggagtagtaccacaaggaatgacgcaagcacaatatactgaattagagaaagctttaccccaattaagcgctggcagtaatatgcaagactataatatgaaattgtatgatgcgacgcaaaatattgctgataaatacaatgtgataattacaactaatgtaggggtatttaaaccacatgctgttagagatatgaatggccatgcgttacctgtaacaaaagatggcaatttttatcaaacgaatgtagatgcaaatggtgttaatcatggtggtagtgaaatggtgcaaaataaaacaggtcatatgaatcagaacacacacatgaaccaacagccacacatgcaacaaggtcatatgcaatcatcaaaccatcaaatgaaccaaagtaacaaaaaagttttaccagctgctggtgaaagtatgacatcaagtattcttactgcaagtattgccgcactactattagtatctgggttattcttagcatttagacaacgttcaacaaataaataaacatcatacgttttaaagtagaaaaatcatgtgattacctgaaagttattgtcgattaaacaatagctaaacagtcatcacatgattttttttcaataattttaataatccgattgtcttatacgtgtcagtgttaattcagatatttcctgtggaatataccacttattaatcataatcggatagggcgtttgtgcgtacaatgtttcaataatcagccaacaatgtgtatcaccatcaaacacgtgactatgatttttgaagtggggcgctttggtaatagacatttttaaatctgattgatatgcattgctataaatcgtttgctcaacgaacgtcttcatgtcgtcttcgttttgtgtattcactttaaatgtgtcaatgacatttaacggtataaaggtaaaacaaaatgcatcagcttgcttagaatggttgtcctttttttgataatagcgttccattgcaatgacggcagaaggatggtttgcaaacaaatgatttgtatattcactttctaaatcaacacgataattaattgatgacatagatacacgatctaataatatttgatcaagtggatgcttaaattgatccatacttgaagcgtgttgggcatttgtttgtggaataacaaagtgtcccttccctcttgtactctctacgatgccatcttcggctaacaattttatagcttggcgcaaagtcatacgactgacatcaaagcgcgcacaaagttccttttcagtaggtaatgcatggccactcggatattttcctatttgaatttctttatataacgtattataaatcgttaaaaattttggttgtgtttgcgtcacgtagacaacctccataaagttacttaatcattctcatcatacaataatttttactcgaattggaaaaattataaaaattaaacatagaaacaacttgaacattggttttatgcaagatcagtagagataactgtaaaatgttcttaatattgtcaaaatgtaatgcttgaaagcgcttttaaaaaatattattatatacatggttagacaaatagacaaattactatacaaatattgggaggaatattttatgaaatcaacaccacacattaaaccaatgaatgacgtcgaaattgcagaaacggttctattgccaggagatccgttaagagctaagttcattgcagaaacatatttggacgatgtggaacagttcaatacagtgcgaaatatgtttggttttaccggaacatataaaggtaaaaaagtttctgtcatgggttcaggaatgggtatgccatctattggcatttactcttatgaattaattcatacatttggttgtaaaaaattaattcgcgttggttcttgtggcgcgatgcaagaaaacattgatttatatgatgtgattgttgcacaaggtgcctctactgattcaaattacgttcaacaatatcaattaccaggtcattttgcgccaattgcttcttatcagttattagaaaaagctgttgaaacagcacgtgacaaaggtgtacgtcatcatgtaggtaatgtgttatcaagtgatattttctataacgcggatacaacagcgagtgaacgttggatgcgtatgggtattttaggtgtagaaatggaatcagctgcattatacatgaatgcaatttacgctggtgtcgaagcattaggtgtgttcacagtgagcgatcatttaattcatgaaacgtcaacaacacctgaggaaagggaacgtgcatttacagatatgattgaaattgcactgtcattggtgtagatgattatgaatgttgaatattctaaaataaagaaagcagtacctattttattattcttatttgtattcagtttggttatagacaactcattcaaattgatttctgtagccattgctgatgacttaaacatttcagtaacgacagtaagttggcaagcgacattagccggtttagtaattggtattggcgctgtagtatacgcttcattatctgatgccattagtatacgcacactatttatttatggcgtgatattaatcattatcggatcaattattggttacattttccaacatcaattcgcattacttttagttggacgtattattcaaactgcaggtttagctgctgcagagacattatatgtgatatatgttgcaaagtatctttctaaagaggaccagaagacttaccttggcttaagtacgagcagttattccttgtcattagttatcggtacattatcaggtggatttatttctacgtatttacactggacaaatatgtttttaattgcattaatcgtagtatttacgttgccattcctatttaaattattaccaaaagaaaataatacaaataaagctcatttagattttgttggcttaattctagtggcaactatcgctacaacagttatgctgtttattacgaactttaattggatatatatgattggtgccttaattgcgattatcgtttttgcgctatatattaaaaatgcgaaacgtccattagtaaacaaatcatttttccaaaataaacgttatgcttcatttttatttatagtatttgtaatgtatgccatccaattgggttatatttttacgttcccattcataatggaacaaatttatcatcttcagctagacacaacatcactgctattagtaccgggttatattgtagcagtcatcgttggtgcactaagtggtaaaatcggcgaatatcttaattcaaaacaagcgattatcacagcaattattttaatcgcactgagcttgattttacctgcatttgcagtaggtaatcacatttcaatcttcgtcatttctatgatattctttgcaggtagctttgctttaatgtatgcacctttacttaacgaagccattaaaacaatagatcttaatatgacaggtgtggctattggtttttataatttaattattaatgtggcggtatctgtaggtattgcgattgctgcggctttaatcgattttaaagcattaaatttcccaggcaatgatgcattaagttcacatttcggtattattttaattattttaggtttaatgagtattgtcggattagttttattcgtcatcttaaatcgttggacacaatctgaaaaataaatagatataaattcgcgagatatattcgtatttatagtaaaattaaataaagagattatataacacgaggagtagtaagtatgaaatttgagaaatatatagatcacactttattgaagcctgagtcaacacgtacgcaaatcgatcaaatcatcgatgaagcgaaagcatacaattttaaatctgtatgtgtgaatccaacgcatgttaaatatgcagcagagcgactagctgattcagaggtgctagtttgtacggtaataggattcccattaggtgcgtcgacaactgcaacgaaagtatttgaaacagaagatgcaattcaaaatggtgcagatgaaattgacatggtcatcaacatcggcgcattaaaagatgggcgttttgatgatgtacaacaagacattgaagcagtggttaaagctgcggaaggtcacacagtaaaagtgattattgagacggtattgttggaccatgacgaaatcgtaaaagcgagtgaattaacaaaagcggctggtgcggacttcgttaaaacttcaacaggttttgcaggtggcggtgcgactgcagaagacgttaaattaatgaaagatacagtaggtgcagatgtagaagtaaaagcatcaggtggcgtacgtaatttagaagatttcaataaaatggttgaagcgggtgcgacacgtattggtgcgagcgcaggcgttcaaattatgcaaggtttagaagcagattcagattactaatatatataaaatttgggagtgatagctatgacaagaccatttaatcgtgtacatttaatcgtaatggattcagtaggtattggtgaagcgccagacgcagctgattttaaagatgaaggttcacatactttaagacataccttagaaggcttcgatcaaactttaccaaaccttgaaaagttaggtctagggaacatcgataaattaccagtagtaaatgcagttgaacaaccagaagcatactatactaaattgagtgaagcttcagttggtaaagatacaatgactggtcactgggaaattatgggattaaatattatgcagccttttaaagtataccctaatggattccctgaagagttaattcaacaaattgaagaaatgacaggtcgtaaagttgttgctaacaaaccggcatcgggtacgcaaattatcgatgagtggggcgagcaccaaatgaaaactggtgacttaattgtttatacaagtgcagacccagtattgcaaattgctgcacatgaagacattatcccattagaagagttatatgatatttgtgaaaaggttcgtgagttgacaaaagaccctaaatatttaattggtcgtattatcgcacgtccatatgttggtgaaccaggaaactttacacgtacatctaatcgacatgactatgcgttaaaaccatttggtaaaactgtcttagatcatttgaaagacggtggttatgatgtcattgccatcggtaaaattaatgacatttatgatggtgaaggtgtaacagaagcggttcgtacaaagagtaacatggacggtatggatcaattgatgaaaattgttaagaaagatttcacaggtattagcttcttaaacttagtagactttgatgcattatacggtcatcgtcgtgataaaccgggttatgcacaagcaattaaagatttcgatgatcgcttgccagaactgtttagcaacttaaaagaagacgatttagtaattattacagcagaccatggtaatgacccgacagcgccaggtacggaccatacgagagaatacatcccagtaattatgtacagtccgaaatttaaaggtggtcatgcactagaaagtgatactacattcagctctatcggtgcaactatagcagataatttcaacgtaacattaccagagttcggtaaaagttatttaaaggaattaaaatagaataaatttagatataataaaaacagcagtgaagttaactataataatagttttcttcactgctgtttttattataatagagaaacgtaagacggtaggacctcttatttaggagtatcctgatttaatgttaaagaatacgttttcggattgaaccggaaattaaatcgacaattgcgaccattagtactaaaccgattaatataatacctacacggtcccaagaacgtgtttgaatggcaaatatgagtggtgtcccgataccaccagccccaattagccccagtatagaagctgaacgtaagtttagttcaaagcgataaagtatgagtgatagaaaggcaggcataatttgtggtatgactgcaaatacgagtgttttaatcttattcgcaccactggcctttaatgattctacagcactgaaatctagactttcaatatcttcagctaaaagtttcccaagcatacctacggaatggatacctaaagctaatacacctgaaaatgaacctgggccaacagctttgataaatataagtgccattacaatttctgggaagacacgtataacacttaaaataaatttgctaacacctgaaactgggcgtagctttaccatattatttgcacctagaaatgctaatggaatacagataattgcggcgatgaaagtacctacaacggctatcgcaaaggtttcaagtaaaccacgtaataagtcttcgccatctggtatatagatatagctgatatcaggatggaataatccgctgaatatggattttaagatttctaatgatttacttttaagttctaaacttggtacacctgcaaatgcccagatgataatagctaagacgacaattgcaataagccatcttttaatcaattttcgtttgtgtgcttttgtgtgaacattatatttttctatttcctgtgtcatgcgagatgtgccctcactttcgtactgatgtaatcaatgacgacgacgataactaaagtaaataaaataatcgttgctgtttttggatattgaaataaaccaagtgtttgatcataaaacaatccaataccgccagcgccgactaatccaagcacagctgaagcacgtatatttacttcaaatgcatataatacgtatgacataaatgacgatatggcttgtggtacaacaccgaaaacaatccattttattttattagcgccaacagccgtcattgcttccattggacctggatctatcgtttccaatgattcatataataattttccaataatacagatagttaaaataaacaatgctaatatccctggaatttgaccgattccaaatacagccacaaagattgctgctaataacaaatctggaatagtacgaactatatttaaaataaagcgcgagggtattgaaatccacttttgatgaacgatattgctagcacataataacgcaattggtattgaaacgatgctacctaatactgtacttacgatagccattcgaatggtatctaacattggcgttgtaatttgttgtaaatactcgaaatcaggtggaatcatttgtttgaatagatcacctatttgaggtattcctatcattaaatctccaaaattaaaccccgtataaatgaagctccaaatgataagcacaatgattaacatgaaggtaaaactcgtttttaaagaaacctttttctttaaaagggagtcatactttgtaggtgtttctaaaggcatgttagttcactcctagcttttcatcttctttaattgtacgtccatatattttactaaatacgtcatctgttgcttcagatgcaggaccatcatagacaacttcaccatcacgtaaaccaatgatgcgtgtgccatattcttttgctaagtcaacaaaatgtaaattaattaaaattgtgatgcctaattcttggttgatttttcttaaatcatccataacctgtttcgttgttaatgggtctaatgaagcaactggttcatctgcaagaataatttcggattcttggcatagcgcacgtgcaatagatatacgttgttgttggccacctgataattcatcagagcgttgattatatttatctaagatgttgacccgttctagtgcatccattgctttaattttgtcttcttttggaaataaacctaataccattttccaagtagggtgataacctacacgtccacttagtacatttcgtaatacacttgaccgtttaactaaattaaaatgttggaaaatcatgcctatatttcggcgcatttctaataatgctttaccatgggctttagtgattgatttaccttgaatgaaaatttcacctgacgtgatatcatgcaaacgatttacagatcttaataacgtggatttcccagcaccagatagtccgacaatgactgcaaattcacctttttcaatatttaagttaatatttttcaagcctacatgaccgttaggatagactttactgacgtttttaaatttgatttgactcatgtttgacacctttctttaataaagaaaagccaaggtaaactgaaatatcatagacattgggtttctgtgtacaaatagtttcaaatgtacagcgacacctttctatatctgtttcagtttagcgcctagcttttcaatattaatctagaatatatctattgaacgaaagcttttaataccaaattcgataatgattcattggttaaataatgattatttcatatctttaactaatttttcgtactctcttacaatgtcgaaatttgaatctttcgtttctgtgtatccttcatgtgaataaacttcgctaataattttgtgaccttcttttgatttagcaatgtctataaaagcttttttcaatttctcttggaagtctttatccatatctggtcttacagaaattgtgtcattcggaatagcttgtgttaattttaaaattcgtgtgtctttaaatacatttggttggtcttttttcacagtattacgtgcatcgttaaatacagctgcagcatctacatctccatttaataatgagataactgcttggtcatgacctttaacattcacaattttcatatctttagttgcattaatacctgcttcgttttttaacatcgcaagtgggaatgtatatccagcagttgatgttacatcttgtaaggcaattttcttaccttttaaatctttcaagcttttaatttttgagtcttttttaacaagaatttctgatttataactatctacaagttctttacttgctgaaccatcttcttttacaccaaaacgttgtgcttgtaataataaatcagctgctttttgatcatgtgctaatgtgtatgccgttggtggtaagaaaccaacatcaacttttttagacttcatagcttcaacaattgtattgtagttagttgatacagacactttaactggaatccctaattctttagatagtaatttttctaatggttttgctttagcctctaatgttccagcattttgcgaaggtacaaattgaactgttaattctttaggtttgtatcctcctgatttagaatccgaatcattactagcgttcttttgattatctaaagaacttgaatttccacatgctgctgcaaaaacaatgactgctaacattaatacaaataaacacttaaaatttttcatttgataactgtccccttcacattcttaatcgtgtaatatgtatgcaatgaaattacacttatagcgtaccacatttaaatgctaaaaagtattttataaaaattaattttaataactttctttaagagtgtgataagattttgtaaaattttcgttaaattgcccatttcaaacatatatttatcctataattcaagaacaaatttattttaaaaggagcctcaaaaaatgaaaaatatatataagtcattaactgtctctgcaattgttgcaacggtatcattaagtgctttaccgcaatctttagctataacgcatgaatcgcaacctacaaagcaacagcaaacagtattattcgatcgttctcatggtcaaacagctggtgctgcagattgggttagtgatggtgcattttcagattatgcggattcaatacaaaaacaaggttatgacgttaaagctattgatggtcattcgaacataacagaagcaagtttgaaaagttccaaaatatttgtaattcctgaggctaacattcctttcaaagaatcagaacaggcagcaattgttaactatgtgaaacaagggggaaatgttgtctttatttcagaccattacaatgctgaccgaaatttaaatcgtattgattcatcagaggcaatgaatggttatcgacgtggagcgtatgaagatatgtcgaaaggtatgaatgcagaagaaaaaagttctactgcaatgcaaggtgtgaaaagttcagattggttatctacaaactttggcgtacgttttcgatataatgcactaggtgatttaaatacgagcaatattgtttcttcaaaagaaagttttggtattactgaaggtgtgaaatctgtatctatgcatgccggttcgacattagcaattactaatccagagaaagcaaaaggtattgtgtatacaccagaacaattgccagcgaaaagtaaatggtcacatgctgtagatcaaggtatttataatgggggcggtaaagcagaaggtccctatgtagcaatttctaaagttggaaaaggtaaagcagcatttatcggtgattcatcacttgtggaagatagttcgcccaaatatgtgagagaagataatggagaaaagaagaaaacatatgatggttttaaagaacaagacaacggtaagctattaaataatataacagcttggatgtctaaagataatgatgggaaatcacttaaggcgagtggcctaacattagatacaaagactaagttgcttgattttgaacgaccagagcgttcaactgagcctgaaaaagagccatggtcacaaccgccgagtggttataaatggtatgacccaacaacatttaaagcaggtagttatggcagtgaaaaaggcgcggatcctcagccaaacacaccagatgatcatacgccaccaaatcagaccgaaaaagtatcatttgatatcccgcaaaatgtttctgtaaatgagccatttgaagtgacaatacatttaaaaggatttgaagcaaatcaaacacttgaaaatcttagagttggtatttacaaagaaggaggacgtcaaatcggacaattttcaagtaaagataacgattataacccgccaggttacagtactttgccaacagttaaagcagatgaaaacggaaatgccacaattaaggtcaatgccaaagtactcgaaagtatggaaggttcaaagattcgtttaaaactcggtgacaaaaccttgattacaacagacttcaaataaatatataatagaaataagaaagatgtttgtgattgaaggagtgagtgaggatgtcaaacatagcattttatgtcgtgagtgacgtacatggttatattttcccaacagattttacgagtagaaatcaatatcagcctatgggattgttactagcgaatcatgttatagaacaagacagaaggcagtatgaccaaagttttaaaatagataatggtgattttttgcaagggtcaccattttgtaattacttaatcgcgcatagcggcagtagccagcctttagttgatttttataatcgaatggcattcgactttggtacgcttggtaatcatgaatttaattatggattaccatacttaaaagacactttacgcagactcaattatccagttttgtgcgctaatatttatgaaaatgatagtacattgactgataacggtgtgcagtattttcaggttggagatcaaacggttggtgtgataggtttaacgacacaatttattccccattgggaacaaccagagcatattcagtcacttacgtttcatagtgcttttgcaacacttcaacaacacttacctgaaatgaagcgatatgcagatatcattgtggtttgttaccatggtggatttgaaaaggatatagaaagtggtacgccgaccgaagtgttaacgggtgaaaatgaaggatatggcatgttagaagcgttttctaaagatatagatatctttattacgggtcaccaacatcgacaaattgctgaaaggtttaagcaaacggctgtgattcaacctggtacgagaggtacaactgtaggcaaagttgtcttgagtactgatgaatatgaaaatgtatccgttgaatcatgtgaattacttcctgttatagatgatcccacatttactattgatgaagatgaccaacatatacgaaagcagctagaggactggttagattacgaaattacaacattgccatatgatatgatgattaatcatgcatttgaggcacgtgtagctccgcatccttttactaattttatgaattacgctttattagaaaaaagtggagcagatgttgcctgtacagctttgtttgattctgctagtggtttcaagcaagtcgtgacgatgcgagatgttattaacaattacccatttccaaatacatttaaagttttagctgtaagtggtttcaaacttaaacaagccattgaacgatcagcagaatattttgacgtgaaaaatgatgaagtaagtgtgagcgcagacttccttgaacccaaaccccaacactttaattatgatatatatggtggcgtaagttataccattcatgttggaagaccaaagggacaacgtgtgagcaatatgatgattcaaggtcacgcagttgatttaaagcagacatatacaatttgtgtaaataattatcgtgcagttggcggtggtcagtatgatatgtatatcgacgcgccagttgtaaaagatattcaagttgaaggcgcacaattacttattgattttttatcaaataataaattgatgcgcatcccgcaagttgttgattttaaagttgaaaagtgacggatatatgtaaaacttacttgattttaatcgggtaagtttttgtttttgtttaaactaatcactcttaaacaccaatatactttaagaaaaatgttgattttacaaaaaacaaggcttatattttatataacttaatattatgaagtgattaatttggaaacaattaaacaagaagtaagagaatctattgttaaaggaattttcgcgggatataaggactatgttaatgagagaaatgaagtcaagaaacgtatggtgattagtgatgcctatgtgtacaccaaatctaatcatattgaaaatcaagttgctaagcatttggaaaattttgttaagtatattaaagaaaatgctggaccatcatggaagtatttaaagtttatatttaataaggatgaagagaaaaataatatcatgtttatattgaaaaatgaagattactttgatgaaaaaaatgtaagcgtagggaagagtttagttgctgataagaatcaaaaaagtaaaaactacctagagggacttatagctaagaatagtggcattaattttgatactgttggagaagattttaaaattaggcatcaaatgactgcagatagtatattatttaatataaaagaaggcagtaatagagatattaattcttattttttaattattacatatcgtattgataaagaatcaaagcaattagctgcaatcaaacaatggttgccaaatccagaaacaaattctgcaattatggttgatgatttgacaccattgttagacaaagtaatagtagaaagagaagattatcatattgacgaagaagagttagaagtacttaaaaacgatggagagttagaattcatagatgtagaacatgcatttggtatcagtatcgatgaagataacgatatgattgaaagcgaaaggtgaagttaatgtttattggcaagaatttagaatacgtgagaaagcttaatgctctaagtagaaaagaattatcagaaaaaataaatgtaagtgaacaagcaatttggcaatatgaaacaaaaaatatgatgccagaaattaataaaatttatgatatgacatctatttttaatgttaaatctagctactttattagcgagcagcccgaagagctcctaataaattctgtcgataaacatagtatagcttttagagcaaaaaattataaagtatctacgaaactattaaataagcaatattatcaagcaatgtatttatctaatttaactagctacttattttcctttgtaaagataccggataatattattttatctttaataaataatttagatgacttgttgaatggcaatttagaatcactaaataaaaaagaaagcataaaagaaactgctaaagttgtgagggctaaaattcttcaagacgaaagcaatgaagcactattatttatgcttgaaaaagcgggtatagttatctacgaaaagcgaattaatgatagtatagacgcatatagtttttggagtaaagatcagacaccttttattatactgggtacaaataagggggtagcagttagaaggaattttgatcttgcacatgagctgggacatctcgttctacatcgtcatattcaattcgatttattatctcctgaagaatataagacaattgaacatgaggcagatattttcgcctctgaatttttactacctgaagaagcgtttaaaaaagactttgatcaaatgacaaaaaaatcaaatcctgattatttagctgtattgaaagaaaaatggtatgtttctatacaagcaattgcaatgagagcctattatctaggtctaatgtctagtactcagtacagatatttttgggcatcattaaataaaaaaggctataaaagtaaagagcctttagacgacgtgattgaaatgtcacgtcctgtcaaaatgaatagtttattaaagttgtattttgatagaaatatactgacaccacaaaaattattgaattatttaaaagttgatgaaacatttttgaatcatctagcaggtattaatttaaaactctttaaggattatgttaatgaaaatagagaatataatataacgaatctatataaataagacaccaatatttaaacctcgagctgaaaagattatcatttcagttcgaggtttttatttgcaacatctgttgataggtatcgacaaggaccttttaatgttgtgttttgtgcgatataacaagctttttaggctattaaagaatattcagaattaaatatataattatgaataaattatgtcattgaaaaaattatgattataaaatcattctaaaaacaccgaaataacaatgatttcatgaaaacatttattttaaaatttgatatttgttcaaataatattcgaaattaaacttttttgtatagaattttctttatatcctgagagacatgtactataatgtttgtgaaataattcacaaagtataaaggagtggttgtatatgttaactatacctgaaaaagaaaatcgtggatcgaaagaacaagaagtggcaattatgattgatgctctagctgacaaagggaaaaaggcattagaagcattatctaaaaagtcacaagaagaaattaatcatattgttcatcaaatgagcttagcagctgttgatcaacatatggtgctagcaaaattagcacatgaagaaactggaagaggtatatacgaagataaagcgattaaaaatttatacgcttctgaatatatatggaattcaataaaagacaataagacagtagggattattggtgaagataaagaaaaaggattaacgtatgtagcggaaccaattggtgttatttgtggtgttacgccaacaacaaatcctacgtcgacaactatttttaaagcgatgattgcaattaagacaggaaatccaatcatttttgcattccatccaagtgcgcaagaatcgtcgaagcgtgcagcagaagttgtattagaagcggcaatgaaggcaggtgcacctaaagatattattcaatggattgaagtgccctctatcgaagcaacaaaacaattaatgaatcacaaaggtattgcattagttctagcaacaggtggttcgggcatggttaagtctgcatattcaactggcaaaccggcattaggtgtgggaccaggtaacgtgccgtcttacattgaaaaaacagcacacattaagcgtgcagtaaatgatatcattggttcaaaaacatttgataatggtatgatttgtgcttctgaacaagttgtagtcattgataaagaaatttataaagatgttactaatgaatttaaagcacatcaagcatactttgttaaaaaagatgaattacaacgcttagaaaatgcaattatgaatgaacaaaaaacaagtattaaacctgatattgtcggtaaatctgcagttgaaatagctgaattagcaggtatacctgtccccgaaaatacaaaacttatcatagccgaaattagcggtgtaggttcagactatccgttatctcgtgaaaaattatctccagtattagccttagtaaaagcccaatctacaaaacaagcatttcaaatttgtgaagacacactacattttggtggattaggacacacagccgttatccatacagaagatgaaacattacaaaaagattttggactaagaatgaaagcttgtcgtgtacttgtaaatacaccatcagcggttggaggtattggtgatatgtataacgaattgattccgtctttaacattaggttgtggttcgtacggtagaaactcaatttcacataatgttagtgcgacagatttattaaacattaaaacaattgctaaacgacgtaataatactcaaattttcaaggtgcctgctcaaatttattttgaagaaaatgcaatcatgagtctaacaacaatggacaagattgaaaaagtgatgattgtctgtgaccctggtatggtcgaattcggttatacaaaaacagttgagaatgtattaagacaaagaacggaacagcctcaaattaaaatatttagcgaagtcgaaccgaacccatcaacgaatacagtatataaaggtctggaaatgatggttgatttccaaccggatacaatcattgcacttggtggtggttcagcgatggatgctgcaaaagcaatgtggatgttctttgaacaccctgagacatcattcttcggtgctaaacaaaagttcctagacatcggtaaacgtacttataaaataggcatgcctgaaaatgcgacgttcatttgtatccctacgacatcaggtacaggttcagaagtaacaccatttgcagttatcacagatagtgaaacaaatgtaaaatatccgttggctgattttgctttaacacctgatgttgcaattattgaccctcaatttgtgatgagtgtgccaaaaagcgttacagcagatacaggaatggatgtactaacgcatgcaatggaatcatatgtatctgtaatggcttcagattacacaagaggtttgagtctacaagcgattaaattgacgttcgaatatttaaaatcatctgttgaaaaaggtgataaagtttcaagagagaaaatgcataacgcatcaactttggctggtatggcatttgcaaatgcattcttaggcattgcacactcaattgcgcataaaattggtggggaatatggtattccgcatggtagagcgaatgcgatattactaccgcatattatccgttataatgccaaagacccgcaaaaacatgcattattccctaaatatgagttcttcagagcagatacagattatgcagatattgccaaattcttaggattaaaaggtaatacgacagaagcactcgtagaatcattagctaaagctgtctacgaattaggtcaatcagtcggaattgaaatgaatttgaaatcacaaggtgtgtctgaagaagaattaaatgagtcaattgatagaatggcagagctcgcatttgaagatcagtgtacaactgctaatcctaaagaagcgctaatcagtgaaatcaaagatatcattcaaacatcatatgattataagcaataatctatctgataataatcatctaactcacctgaaattacaaaagtaaaaaatgccacataaacttaaagtcgataatcattatacggttatcggcttttctttattgccaaatcttcagagagatacaacctagacaatcaattttttttaataaagaaagtattaagattggtacacttttcacaaactattactactttagagtataattatttttaatttcatataaataaaaaggcgaaaataatgcggtttaaaagtaattaattgtttaaacgatatgtaatatgtaaatactatatatataataccaattttaatgaaaatttttaagggaggtaaataatggaaagtacattagaattaacaaaaattaaagaagtattacaaaaaaacttgaagattttaattattttaccgctattatttttaattattagcgctattgttacatttttcgtcttatcacctaaatatcaagctaatactcaaattttagtgaatcaaactaagggtgacaatcctcagtttatggcgcaagaggttcaaagtaatattcaacttgtaaatacgtataaagaaattgttaaaagtcctagaattttagatgaggtgtcaaaggacttaaatgataagtattcaccatctaaattatcgagtatgttgacaattacaaaccaagaaaatacacaacttatcaacatccaagttaaaagtggtcataaacaagattcggaaaaaattgcgaatagcttcgctaaagttacaagtaaacaaattccgaagattatgagtgtggataacgtatcaattttatctaaagcagacggtacagcagttaaagtcgcaccaaaaactgtagtgaatctaatcggtccactctttttaggattagttgtcgcgcttatatatatcttcttcaaagtaatttttgataagcgaattaaagatgaagaagatgtagagaaagaattaggattgcctgtattgggttcaattcaaaaatttaattaaggatggttgctacttatgtcaaaaaaggaaaatacgacaacaacactatttgtgtatgaaaaaccaaaatcaacaattagtgaaaagtttcgaggtatacgttcaaacatcatgttttcaaaagcaaatggtgaagtaaagcgcttattggttacttctgaaaagcctggtgcaggtaaaagtacagtcgtatccaatgtagcgattacttatgcacaagcaggttataaaacgttaattatcgatggggatatgcgtaagccaacacaaaactatatttttaatgaacaaaataataatggattatcgaatttaatcattggtagaacgactatgtcagaagctattacgacgacagaaattgataatttagatttactaacagctggtcctgtacctcctaatccaacagaattaattggttctgaaagatttaaagagttagttaatcttttcaatgagcgttatgacatcattattgtcgatacaccgccagttaataccgtgactgatgcacaactatatgcacgtgctattaaagatagtctgttagtcattgatagtgaaaaaaatgataaaaatgaagttaaaaaagctaaaacacttatggaaaaagcaggcagtaatattctaggcgtcattttaaataaggcaaaagtagataagtcttctagttattatcactattatggagatgaataggtatgattgatattcataaccatatattgccgaatatcgatgacggtccgacaaatgaaacagagatgctggatcttttaagacaagcgacaacacaaggtgttacagaaatcattgtaacatcacatcacttacatcctcgatataccacacctatagaaaaagtgaaatcatgtttaaaccatattgaaagcttagaggaagtacaagcactaaatctaaagttttattatggtcaggaaataagaattaccgatcaaatccttaatgatattgatcgaaaagttattaccggtattaatgattcacgctatttactaatagaatttccatcaaatgaagttccacactatactgatcaattatttttcgaattacagagtaaaggctttgtaccgattattgcacatccagagcggaataaagcaataagtcaaaaccttgacatactatacgatttaattaacaaaggtgctttaagtcaagtgacaacggcgtcattagcgggtatttccggtaaaaaaattagaaaattagcaattcaaatgattgaaaacaatctgacacatttcatcggttcagatgcgcataacacagaaatcagaccgttcttaatgaaagacttatttaatgataagaaattacgtgattattatgaagatatgaacggatttattagtaatgcgaagttagttgttgatgataaaaaaattcctaaacgaatgccacaacaagattataaacagaaaagatggtttgggttataaacagcaaatgaggggttttatggcacatttatctgtgaaattgcggcttttaatactagcattaatcgattcactgatagtgacattttcagtattcgtaagttattacattttagaaccgtatttcaaaacatattctgtcaaattattaatattggcagctatatcactattcatatcgcatcatatttcagcatttatttttaatatgtatcatcgagcgtgggaatatgccagtgtgagtgaattgattttaattgttaaagctgtgacgacatctatcgttattacgatggtgttcgtgacaattgttacaggcaatagaccgttttttaggttgtatttaattacttggatgatgcacttgattttaataggtggctcaaggttattttggcgtatttatcggaaataccttggaggtaagtcatttaataagaagccaactttagttgttggtgctggtcaagcaggttcaatgctgattagacaaatgttgaaaagtgacgaaatgaaacttgaaccggtattagcagtcgatgatgacgaacataaacgtaatatcacaattactgagggtgtaaaagtccaaggtaaaatcgcggatattccagaactagtgaggaaatataagattaaaaaaattatcattgcaattccaactattggtcaagagcgtttgaaagaaattaataatatttgccatatggatggcgtagagttattgaaaatgccaaatatagaagacgtcatgtctggtgagttagaagtgaaccaactgaaaaaagttgaagtagaagatttacttggcagagatcctgttgaattagatatggatatgatatcaaatgaattgacgaataaaactattttagttacgggcgctggaggttcaataggatcagaaatttgtagacaagtttgtaatttctatccagaacgtattattctacttggccatggtgaaaacagtatttatttaatcaatcgtgaattgcgaaatcgcttcggaaaaaatgttgatatcgttcctattatagcggatgtgcaaaatagagcgcgtatgtttgaaattatggaaatgtataaaccatacgcagtttatcatgcagcagcacacaagcacgtgccgttaatggaagacaaccctgaagaagcagtacgtaataatattttaggtacgaaaaatactgctgaagctgctaaaaatgcagaggtaaagaaattcgttatgatttctacggataaagccgttaatccacctaatgtcatgggagcttcaaagcgaattgcagaaatgattattcaaagtttaaatgatgaaacgcatcgaacaaattttgttgcagtgagatttggtaatgtacttggatcgagaggatctgtgattccacttttcaaaagtcaaattgaagaaggtgggccagttactgtgacacatcctgaaatgacacgttactttatgacaattcctgaagcttctagactagttttgcaggcaggggcattagcagaaggtggcgaagtatttgtgttagatatgggagaaccagtgaaaatagtagatttagcacgaaatttaattaagttaagtggtaagaaagaagacgatatacgcattacttttacagggattagacctggtgaaaaaatgtatgaagaattgatgaataaggatgaaattcaccctgaacaagtatttgaaaaaatttatcgtggcaaagtacaacatatgaaatgtaatgaagttgaagcgattattcaagacatcgtcaatgactttagtaaagaaaaaattattaactatgccaatggcaaaaagggagataattatgttcgatgacaaaattttattaattactgggggcacaggatcattcggtaatgctgttatgaaatggtttttagattctaatattaaagaaattcgtattttttcacgcgatgagaaaaaacaagatgacattcgaaaaaaatataataattcaaaattaaagttctacattggtgatgtgcgtgatagtcaaagtgtagaaacagcaatgcgagatgttgattacgtattccatgcagcagctttaaaacaagtgccgtcatgtgaattctttccagttgaggcagtgaagacaaatattattggtacagaaaatgtcttacaaagtgctattcatcaaaatgttaaaaaagtcatatgtttatctacagataaggcagcgtatcctattaatgctatgggtatttcgaaagcaatgatggaaaaagtattcgtagctaaatcaagaaatattcgtagtgaacaaacgcttatttgcggtacaagatacggtaatgtaatggcttcaagaggttcagtaattcctttgtttatcgataaaatcaaagctggagaacctttaacgattacagatcctgatatgacaagatttttaatgagcttagaagatgcggtagaactagttgttcatgcatttaagcatgcagagacaggcgatattatggttcaaaaagcaccaagttcaacggtaggggatcttgcaaccgcattattagaattgtttgaagctgataatgcaattgaaatcattggtacgcgacatggagagaaaaaagcagaaacattgttgacgagagaagaatacgcacaatgtgaagatatgggtgattattttagagtgccggcagactccagagatttaaattatagtaattatgttgaaaccggtaacgaaaagattacgcaatcttatgaatataactccgataatacacatattttaacggtggaagagataaaagaaaaacttttaacactagaatatgttagaaacgaattgaatgattataaagcttcaatgagataggagagattgacgttgaatattgtaattacaggagcaaagggttttgtaggaaaaaacttgaaagcagatttaacatcaacgacagatcatcatattttcgaagtacatcgacaaactaaagaggaagaattagagtcagcgttgttgaaagcagactttgtcgtgcatttagcgggagttaatcgacctgaacatgacaaagaattcagcttaggaaacgtgagttatttagatcatgtacttgatatattaactagaaatacgaaaaagccagcgatattattatcgtcttcaatacaagcaacacaagataatccttatggtgagagtaagttgcaaggtgaacagctattaagagagtatgccgaagagtatggcaatacggtttatatttatcgatggccaaatttattcggtaagtggtgtaagccgaattataactctgtgatagcaacattttgttacaaaattgcacgtaacgaagagattcaagttaataatcggaatgttgaactaacgctaaactacgtggatgatatcgtcgctgaaataaaacgtgctattgaaggaaatccaacgattgaaaatggtgtacctacagtaccaaatgtatttaaagtgacattgggagaaattgtagatttattatacaagttcaaacagtcacgtctcgatcgaacattgccgaaattagataacttgtttgaaaaagatttgtatagtacgtatttaagctatctacctagtacagactttagttatcccttacttatgaatgtggatgataggggatcttttacagaatttataaaaacaccggatcgtggtcaagtttctgtaaatatttctaaaccaggaattactaaaggtaatcactggcatcatactaaaaacgaaaaatttctagtcgtatcaggtaaaggggtaattcgttttagacatgttaatgataatgaaatcattgaatattacgtttctggcgacaaattagaagttgtagacataccagtaggatacacacataatattgaaaatttaggcgacacagatatggtaactattatgtgggtgaatgaaatgtttgatccaaatcagccagatacgtatttcttggaggtatagcgcatggaaaaactaaaattaatgacaatagttggtacaaggcctgaaatcattcgtttatcatcaacgattaaagcatgtgatcaatattttaatcagatattagtacacactggtcaaaattatgattatacattgaatcaaattttctttgatgatttggaattaagacaaccggaccactacttagaggcagttggaagtaacctcggagaaacgatggggaatattattgcgaagacatatgacgttttattacgcgaacaaccagatgcacttttaattcttggtgatacaaatagttgtttagcagcagtatctgctaaacgattaaaaattcctgtgttccatatggaagcgggtaatagatgctttgatcagaatgtacctgaagaaatcaatcgtaaaattgttgaccatgtcagtgatgtgaatctaccttatacagaacatagcagacggtatttattagatgaaggcttcaataaagcgaatatctttgtgacaggatcaccgatgacagaagtgatagaagcgcatcgagataaaattaatcacagtgacgttttaaataaactaggattagaaccgcaacaatacattttagtatctgcgcatagagaagagaatatcgataatgaaaagaattttaaatcattaatgaatgcgataaatgatattgccaaaaagtataaaattcctgtgatttattcaacgcatccaagaagttggaagaaaattgaagaaagtaaatttgaatttgatccattagttaaacagttaaagccatttggtttctttgattataatgcattgcaaaaagatgcatttgttgtgctatcagatagtggaacattgtcagaagagtcgtctattttgaagttccctggtgtccttattcgaacttccacagaaagaccggaagtactagataaaggtacggttattataggtggtattacctataacaatctaatccaatccgttgaactagcaagagagatgcaaaacaataacgaaccgatgattgatgctattgattataaagacactaacgtttcgacaaaagtagttaaaattattcaaagctataaagatattatcaatcgaaatacttggaggaaatgacgatgaggatagcgattcttggcgctactaacattaagcatatgtcattattatcacattatttaaaccacattgatttgaatatcaatgaggtggacattatatacactgacaaatatgatatcgaagaaaatatccaaggcatcaataattactataaatataaagtagatattaaagaagattggacatttatcaaaaaagctattgcttactatcgatttaggccatacgctatgaaaattctcaaagaaaatcattatgattttgtcatagtatggggaagttatacaggacacttatttaaaagttttttagaaaaacactataaaaataaattcattttaaatataagggactacttttttgaaaataataaacttattaagtatagaatgaaaaaaatcgttgatgctagcaggctgacaacattatcttcagaaggttttcttaaatttttacctaaatctgaaaaatatagaattatttatagttataacatgagtattattagagaaagtaatgtgaccgatgaattcaaaaaaagatggccaattaatataggttttattggtaatgtcagatttaatgagataaatcaaaaattgataaaggaactggcaaatgattcaaggttccatatgcaatattttggaacagggtcggaaaaattagaagtctttgctcgagaaaattttattaataatattacattttctggcggttttgacttggaagaaacaccgaaatatttaaatgaaattgatatacttaataatttgtttggtaataaaaatattgctttagatactgctttatccataagaatgtattatgcgttgtttttaaacaaacctattattacaacagatgatacattcaccgctacagaagctaataaattcggactgggttttagtgttaatccagaaaatttaaaaggtattggtgatgaattgatggattggtataacaatttgaatgtaatggacattaatcataaaagagaagcttatagaaacgatgtaattgaaaataataaacagttctatcaagagataggcaggatatttaatgaataagatatataatgtcacttcatatgttattgccattttaatgtttccttgccttatgttaggtgataaacctttattgtttttagcacctataagttatggagtaggaaagctctttataagcttctcaaataatccgaattttaaattttcgaaaattgtatacgatgttttaggttttcttagattagtatttatacctgctatgatagtgtttttccaggattcaactatagataatttaccattaggacaagattattttaatcaagcggttatttatatgagtgtggagtttatcataggctcgctatttatattgatactatctaaattattcaaacatgaagtggtatcaagaaatagctttacactttctggatcatcaatttattacattgtgtttggtcttgttatttgtgggatttttgtagcttttcccgaagtgcgcaaaaacatatcatttttaattattaaaacagatgcaatgggaagaggaaccgaagcaacaagtggtttaaatgtcctttttgtaatgctatttcaacttgccttagcgttattattcttaataatcgcatatgcttcatataaaaagtataaagagaatcctaaaattatttatgttatattgccgctagctatagggattttaaatattagtttaattgttggtgaaagaagaagttatcaactttatacgatggttgctgttttaacagtggtgtcactcttgttttctaagcacaaaagacgtatcaatatcattattatatctgttggtattttcgtattagcattgatgacactatataaagaattgtatgtgtttaattatagttcatatagcgaggcgttaaatagtacgagtgtaagtaatcttaagatagttgacacgttgcagtcatatttttatggacctagcaatattgcagcttctatagactatttgaattactataatggttcgtttaaacaatatttatttgataatactagagctgtttttgggtttaatttctttgtagataaaaagcagttgattactagccaactttttaaccaattgatatatggtagtaaacaattgactggtcatctaatttcgagtgctggatatggaattatttattttggacccttattcttctatttgaatttaattgcaaatatcttttttgcatttctgagtgagtatattattcggaagagtcattcgttagaagtgatatttattggtacatatatttatatgagacttattacgagtatttttagtcacccgacaccattaatcacattgatttctatgattttagttgtatatgttatagctattatcccaggcattataataaaaaaatttactaaaaaagtagggatagaatgattgtaaaaacatttatgaaatcgaaaatatttagattaatgaatacaccactattattattttataagaaagaatatttaactggatattattttgaaaataaagtggctggatggttatgggcatggaaagctgttccgttcaagttgttaggaataaatacgagcttgccatttcctgcagatataactgttagaatgcataaccctaataacattgtttttgataaaaatgatattcatattttccaatcgcccgggacgtattttaataatttttcagcagttatatatataggtagaggtgtttatatagcgccaaacgtaggtattattacagctaatcataatattaaaaatttgaagtcacatgcaccaggtgaagatgtcaaaatagggaattatagttggattggaatgaactcagttatattaccaggagtagaattgggggaacatacaattgtaggggctgggtcggttgtaacaaaaagttttccagaaggtaacgttgttataggtggcaatccagcgaaagtcatcaagaaaatctgaggttaattatgagattaaataaatttattggcgattcgttcttaatgattttaagcagtggcatcgctcaagtcatattaatcatcactaccccaattattacaagactatattcacctacagaatttggtgagtttacaattttttcaaatatcgcaatgattttaataccaataataaatgcaagatacgatttgttgattgtgaatactaaaaatgaccgtagtgctaatatactttcacaaatcagttttttgatatcattgcttattttattaatactgataccaatatttgcgattagtgcatggttatacccaaactttatattagattttattttcattattattatgttgtttttggtaagtttaacaaacatttttacaaattatctaaataaggaaagaaaatataaagtgttaagtttgattaatgtgtttagagctggatcaatggctttacttcaaattattttcggacttttagcattaggaagtctaggattaattattggtttttcattatcctatatcgcaggcattacactaggatataaaacgtttaaaaagcactttaatattgtgagagataaagaagaaactaaagcattatttttagaaaataaaaatcagttagtttattcaacaccatcaatattattaaatagtttgtctttctcggttgttgtgttctttataggtattttgtataccaatacagaagtaggtatttatggtatggccataagagtactaggcataccagtgacaattatttcattagggttatcaaaaatatttatgcaacaagctaatgactattatattgaatatggtaacttccgaaatttattacttaaatttagttccatactggttatagtttctataattctttatgtgccactttatttgttcagtgaagaattagtcaatatattattaggacatagctgggttgacgcaattacagttataaaaattgttattccattatttgttataaggctgattgtatcaacggtatcactttctgtgattgtattacaaaaacaacagttagaattaatactgcaagcgttatttttaataggtactactgcaacatttgttatatcaaaaatgcttaatttaacttttttaaactttgtatctattaatacagttgttttaatcgtatcgtacatgatatttttcatagcactctattattttgctaaaaataaacagttcaaaaattcttagtctaaattcattaataaaaaggacgtcgattagatgagtgaaaaaaagattttgattttatgtcagtatttttatccggaatatgtatcttcagcgacgttaccaacacaattggcggaagatttaattgcgaatcacattaatgtcgatgtcatgtgtggatggccatatgaatatagtaatcataaacaggtttctaaaaccgagatgcatcgtggtattcgcattcgacgtctcaagtattcgaggtttaataacaaaagtaaggttggaaggatcatcaatttctttagtttattttcaaaattcgtgattaatatacctaaaatgttgaaatatgatcagattcttgtttactctaatccaccaatcttgccattaataccagacgttctacacagattgcttaagaaaaaatattcttttgtggtgtatgatatagcacctgataatgcgattaagacaggtgcaacacgtccaggtagcatgattgataaactgatgcgttacattaataaacatgtctacaagaatgctgaaaatgtcattgtccttggtacggaaatgaaaaactacttactaaatcatcaaatttctaaaaatcctgacaatattcatgtgattcctaactggtatgacatgcgtcagttacaagacaatcgtatctataatgacacatttaaagcttaccgtgagcaatacgacaaaattttattgtatagcggtaatatggggcagttacaggatatggagacacttatctcatttttaaaattaaataaggatcagcctcaaacgttaacaatactttgtggtcatggtaagaaatttgcagatgtcaaaacggcaatagaagaccatcgtattgaaaatgttaaaatgtttgagtttttaacaggtacagactatgctgacgtattaaaaattgcggatgtatgtattgcatcgctgattaaagaaggcgtcggtttaggcgtgccgagcaagaattatggctaccttgcagctaagaagccgttggtactcatcatggataagcaatctgatatcgttcaacatgttgaacaatatgatgcgggtatccaaattgataatggcgatgcacatgccatttataacttcatcaacactcactcgagtaaggaattgcacgagatgggtgagcgcgcacatcaactgtttaaagataaatatacgagagaaattaatactatgaagtattacaatctgttgaagtgaggagataattatgaagcgattattcgatgtagtgagttcaatatatggtttagtagttttaagtccgattctgttaattacagcattactaattaaaatggaatcacccggaccagccattttcaaacaaaaaagaccgacgattaataatgaattgtttaatatttataagtttagatcaatgaaaatagacacacctaatgttgcaactgatttaatggattcaacagcgtatataacaaagacagggaaggtcattcgtaaaacctctattgatgaattgccacaattattgaatgttttaaaaggagaaatgtcaattgtaggtcctagaccagcgctttataatcaatacgaattaattgaaaaacgtacaaaagcgaacgtgcatacgattagaccaggtgtaacagggctagctcaagtgatggggagagatgatattactgatgatcaaaaagtagcgtatgatcattattacttaacacatcaatctatgatgcttgatatgtatatcatatataaaacaattaaaaatatcgttacttcagaaggtgtgcatcactaatgagaaaaaatattttaattacaggcgtacatggatatatcggtaatgctttaaaagataagcttattgaacaaggacatcaagtggatcaaattaatgttaggaatcaattatggaagtcgacctcgttcaaaggttatgatgttttaattcatacagcagctttggttcacaacaattcacctcaagcaaggctatctgattatatgcaagtgaatatgttgcttacgaaacaattggcacaaaaggctaaagctgaagacgttaaacaatttatttttatgagtactatggcagtttatggaaaagaaggtcaggttggtaaatcagatcaaattgatacacaaacaccaatgaaccctacgaccaactatggtatttccaaaaagttcgctgaacaagcattacaagagttgattagtgattcgtttaaagtagcaattgtgagaccaccaatgatttatggtgcacattgcccaggaaatttccaacggttaatgcaattgtcaaagcgattgccaatcattccaaatattaataatcagcggagtgcattatatattaaacatctgacagcatttattgatcaattaatatcattagaagtgacaggcgtgtatcatcctcaagatagtttttactttgatacatcgtcagtaatgtatgaaatacgtcgccaatcgcatcgtaaaacgctattgatcaacatgccttcaatgctaaataagtattttaataagttgtcggtctttagaaaattattcggcaatttaacatacagcaatactttatatgaaaataataatgcgcttgaagttattcctggaaaaatgtcacttgttattgcggacatcatggatgaaacgacaaccaaagataaggcataagtcatctattaaataaaatcaacatacaaatcgttttatttggaggttatagtatgaagttaacagtagttggcttaggttatattggtttaccaacatcaattatgtttgcaaagcatggcgtcgatgtgcttggtgttgatattaatcagcaaacgattgataagttacaaagtggtcaaattagtattgaagaacctggattacaagaggtttatgaagaggtactgtcatcgggaaaattgaaggtatctacaacgccagaagcatctgatgtttttatcattgccgttccgacaccgaataatgatgatcagtaccggtcatgtgacatttcgctagttatgcgtgcattagatagtattttaccatttttagaaaaaggaaataccattattgtagagtcgacaattgcgcctaaaacgatggatgattttgtaaaaccagtcattgaaaatttagggtttacaataggtgaagatatttatttagtgcattgtccagaacgtgtactgccaggaaaaattttagaagaattagttcataacaatcgcatcattggcggtgtgactaaagcttgtattgaagcggggaaacgtgtctatcgcacattcgttcagggagaaatgattgaaacagatgcacgtactgctgaaatgagtaagctaatggaaaacacatatagagacgtgaatattgctttagctaatgaattaacaaaaatttgcaacaacttaaatattaatgtattagatgtgattgaaatggcaaacaaacatccgcgtgttaatatccatcaacctggtccaggtgtaggcggtcattgtttagctgttgatccgtactttattattgctaaagaccctgaaaatgcaaagttaattcaaactggacgtgaaattaataattcaatgccgtcctatgttgttgatacaacgaagcaaatcatcaaagcgttgagcgggaataaagtcacagtatttggtttaacttataaaggtgatgttgatgatataagagaatcaccagcatttgatatttatgagctattaaatcaagaaccagacatagaagtatgtgcttatgatccacatgttgaattagattttgtggaacatgatatgtcacatgctgtcaaagacgcatcgctagtattgattttaagtgaccactcagaatttaaaaatttatcggacagtcattttgataaaatgaagcataaagtgatttttgatacaaaaaatgttgtgaaatcatcatttgaagatgtatcgtattataattatggcaatatatttaattttatcgacaaataaaatgtgtcaaactagggcatacatgattaaggaaagataagctgtcatgtgtttgaacttcagagaggataatgttatgaaaaaaattatggttattttcggtacgagacccgaagcaataaaaatggcaccattagtaaaagaaattgatcataatgggaactttgaagcgaacattgtgattacagcacaacatagagatatgttagatagtgtgttaagtatatttgatattcaagctgatcatgatttaaatattatgcaagatcaacaaacgttagcgggcattacggcgaatgcgcttgctaaacttgatagcatcattaatgaggaacagccggatatgattttagtacatggtgatactacaacgacttttgtaggaagcttggcagcattttatcatcaaattccggtcggacatgtagaagctggacttcgaacacatcagaaatactcaccatttcctgaagagttaaatcgagtcatggtaagtaatattgctgaattgaattttgcgccaacagtaattgcagctaaaaatttactttttgaaaacaaagacaaagagagtatctttattaccggaaatacagttattgacgcattgtcaacaacagttcaaaatgagtttgtttcaacgattattaataaacataaaggcaagaaagttattttactaacagcgcatcgtcgtgaaaatattggagaaccgatgcatcagatttttaaagcagtaagagatttggcagatgaatataaagatgttgtcttcatttatccaatgcatcgtaatccaaaggtaagagcgattgccgaaaaatatttatctgggagaaatcggattgaattaattgagccattagatgcgcttgagttccataattttacaaatcaatcgtacctcgtgctgacagattctggtggtattcaagaggaggctcctacatttggaaaacctgtgttggtattaaggaatcatacagagcgtcccgaaggcgttgaggcgggaacatcgagagtaattggcacagattatgacaatattgttcgaaatgtgaaacaattgattgaggatgatgaagcgtatcaacgtatgagtcaagcgaataatccatatggtgatggacaagcatcacgacgtatttgtgaagcaatagaatattattttggattgcgttcagacaagccggatgaattcgtacctttacgtcgcaaataataaaaaacccctaatcattaagttggtttagacaaccagcggtgactaggggtttttaatatgtttatttttgatagtggtagccaatatcatatttgaatactttatttgataatattggactttgctgtccatcgtcatcactttttaaacgtacatttttatgagcttctttaaatacatcggaattcaaccaattattaaagctatcttcagattcccaaatagttaagattttaacttcatctgtatccttggtatttaatgttttagtgacaaacatttgttggaagccttcaatagtttcaataccttgtctattgtaaaaacgttcaatcgtttcttccgcactgcctttttgtaattgtaatctattttctgccataaacatgggcaatcactcctctattttattatttgatttgggtaatgtttttacaaatgtaaagagtacagcggtttgtatgataaccattatgattaatcctatacggactgcaagaacatccaccatataaattgaaaaacctattacaatgtataagctaattaaaattttaattttctgttgtagcgtgtagcctcgatgtaaataaaagttttctacatattctttataaattttttgattaataagccaattgtaaaagcgatctgaacttcgagcaaaacaaaaaactgctacgagtaaaaaaggggtcgttggcagtaaaggtaatacggcacctgcaataccaagcgctgtaaatattaagccaatgacgattaaaataagtcgcattgaaaaaactccattctagtactaatgcgcatgtaatattgttttagtaatataactcatgctaaatataatgtgtatgataagtgcaatgactcagtaagatgaaacgttgttgaattatccttgtcccattaacgcattttaagcgcgactttcataacaaccaaactatttaatgagaattattctcaagtattatagttatattatgtgttttatttttgaaaagtgcaatatgttttcgaaaataagattatttttatgtgcaaaaacgacgcaaaagttttaaaaatgagacttctgtgagctgattattttataaaatgtaaacgcttactatataatgtgaatcatatcgtttaaaagcattattaaatatgatgctaagagatttatattatagccaataaacaaaggagagataatatggcagtaaacgttcgagattatatagcagagaattatggtttatttatcaatggggaatttgttaaaggtagcagtgacgagacaatcgaagtgactaatccagcaactggagaaacactatcacatattacaagagcaaaagataaagatgtcgatcatgcagtcaaagtggcgcaagaggcatttgaatcatggtcattaacttctaaatcagaacgtgcacaaatgttgcgtgatattggtgataaattaatggcacaaaaagataaaattgcaatgattgaaacattaaataatggtaaaccgattcgtgagacaacagcaattgatattccatttgctgcaagacatttccattatttcgcaagtgttattgaaacagaagaaggtacagtgaatgatatcgataaagacacaatgagtatcgtacgacatgagccgattggcgtcgtaggtgctgttgttgcttggaacttcccaatgctattagctgcatggaagattgcgccagccattgctgcaggtaatacaattgtgattcaaccttcgtcttcaacaccattaagtttattggaagttgctaaaattttccaagaggtattacctaatggtgttgtcaatatactaacgggtaaaggttcagaatcaggtaatgcaattttcaatcatgatggggtagataaattatcatttacgggctcaactgatgtaggttatcaagttgccgaagctgcagcgaaacatctagtacctgctactttagagcttggtggtaaaagcgccaatatcatattagatgatgctaatttagaccttgcagttgaaggtattcagttaggtattttattcaaccaaggtgaagtatgtagtgcaggttctcgattattagttcatgaaaaaatttatgatcaattggtgccacgtttacaagaggcattttcaaatattaaagttggagatccacaagatgaagctacacaaatgggtagtcaaactggtaaggatcaattagataaaattcaatcatatattgatgcagcaaaagaatcagatgcacaaattttagcaggtggtcatcgtttaactgaaaatgggttagataaaggattcttctttgaaccaacgttaattgctgtgccagataatcatcataaattagcgcaagaagaaatatttggaccagttttaacagtgattaaagtgaaggatgatcaagaagcaattgatatagctaatgattcagagtatggtttagctggcggcgtattttctcaaaatatcacacgtgcattaaatattgctaaagctgttcgtacaggacgtatttggattaacacttacaaccaagtaccagaaggcgcaccatttggtggttataaaaaatcaggtatcggtcgagaaacttataaaggtgcgttaagtaactatcaacaagttaaaaatatttatattgatacaagcaatgctttaaaaggtttgtactagaataaatatcatttttgaagcgtgtttgtaggcagtctagcggtaagtcttagcatgtttacggagttgtttagattttaagcgaaacaaaatatttaggaacttgcataatgatactaggatataatgactaaaataatagcagtaggatggtttttaattgcaaatcatcttactgctgtttttacttatgctaatttgcgatgcggctattataaggacagagttgtttatgaattaaggtgattttgaaatatgaagttctatatgcaaatgtatcgtttgttttaatatgtggaacaatcataaaatactattgttatttttggacttgatgaaataaaacaaatgaatttgagaaacttttttgtcatttttatgtaattagcacaatcatatcggaaatgtttaaaaatttctatatgatagggataaagcaaagcgcgagtgtgctgtaaaagtttttccaaggtgatattacataaaggtataaagggtaaagattaatgagttgtcatgtaaagtacgatgatgtataaattatggttaattacggaagcattaatactaacctgagaagctataaataattgttattaaaagcaactacattaaatacgacgcatttatttaggagtggcaaactatgaacgggaaaaaggcgaatacgataaacagatacaaatattttcatcatgtcgatcatcaaaaaattcaacaaagttctaaaaagacgctatgggcatcacttatcatcacactattatttacagtgattgaatttgttggaggtttagtatctaattcattagcattgctgtcagactcatttcatatgcttagtgatgtattagcactcggtttgtcaatgttggcaatttattttgctagtaagaagccgactgcacgctacacattcggatatttaagatttgagatattagcggcatttttaaatggtttagcattaattgtaatttcaatctggattttatatgaagctattgtacgtattatttatccgcaacccattgaaagtggcattatgtttatgattgctagtattggtttactcgtcaatattattttgactgttatccttgtaaggtctttaaaacaagaagacaatatcaatattcaaagtgcattatggcatttcatgggagacttattgaactctattggtgtcatcgttgcaattgtattgatctactttacaggatggcgcatcattgacccaatcattagtattgtaatttcactcatcattttacgtggtggttataaaattacgcgtaatgcgtggttaattttaatggaaagtgtgcctcaacatttggatactgatcaaattatagcagatataaaaaacatagatggcatattagatgtacatgaatttcatttgtggagtattacaacagaacattattcattaagtgcccatgttgtgttagataaaaaatatgagggggatgattatcaagcgattgatcaagtatcatcattgttgaaagaaaaatatggcattgcacattcaacgttgcaaattgaaaacttgcaattgaatccattagatgagccatacttcgacaaactaacataaataaaacattgtagcgcctaaaacattaatcaatgtcataggcgcatgtttcgttttatacttatgttgcatcatctaaatgattttcgtcgatgtctttgatggtatctacatctaacacgacatctttaggtttcaaaatatgaatatgtttttcatcatttgtatgtaaaatgcgttctatgatgtacctttgaccggtcattgtttctacagcaatctttttgtttcttgctaaacttgctacgacagattctttatccataatgatagccccctatatatatctttatttacttataccctaacattatttttatactctttgaaaatatattttacagaattttatctaaatatttaaaaaaatcgctcaatatccttgtaatccgataagaattatagtaatatttttttcaaccattgttataggaggtcttattaatgacattatttttattagaagctaacaatcttgattttgcatcaacgaaagaagaactagaagcaaaggcatcatcactatctacgaagacaattccaacattaattgaagtacaagctactgaaaatttaactcatggttattttattgtggaagcaaatgacgaagcagaagctaaacaatttttaacagaagcaggtattagcattcaattagtcaaagaagtacgcttagttggtgaagatttagatgaagtaaaaaatggtgatgcacatgttgattaccttgtaacttggaacattccggaaggcattacgatggatcaatatttagcacgtaaaaagaaaaattctgttcattatgaagaagtgccagaagttgaatttaaacgcacatatgtatgtgaagatatgtctaaatgtatttgtttatacaacgcacctgatgaagaagcggtacgtcgcgcgcgcaaagcagttgatacaccgattgatggcatcgaaaaactttaataagacaacaagttgatgatatatatgtatataggtttggcgtggatttcgattgcagttaattagaatagctcaatgctataaatgtaagtagttgatatgacgaaactaatgaactaaatgcaagttttgtctaaaacaatcattttattgaaatttagtagagctgaaattaatataacgtcgttaattgaataacgcttatgttataagagtactcataccaaaccataatcatctatagatataacaattcacgatttaagggctgtgtttggcatagccctttagatatacatttaattcttattaaaatggtagggattaaaagggggcttgtcatgattaaaatacaacaattacaacatcactttggatcacataaagtaattcataactttaatttggacattagcaagggagaaatagtcacttttatagggaaaagtggttgcgggaagtctactttactcaatatcatcggtggatttattcatccatcatctggtcgtgtcattattgataacgaaattaaacaacagccgtctccagattgtttaatgctatttcaacatcataatctgctgccatggaaaacgattaatgacaacattaggattggattccaacagaaaattagtgatgaagagattaacgcacagcttaaattagttgatttagaaggcagaggaaagcattttcccgagcaactgtccgggggtatgaaacaacgtgtggcactatgtcgagcgcatgtgcataagcctaacgttatattgatggatgagccattaggtgcattagatgcatttacacgctataaacttcaggatcaactagtacaactaaaacataaaacggaatcaactattatcttagtcactcacgatattgatgaagctatttatctttccgaccgcattgttctgttaggtgaagggtgcaatattatttctcaatatgaaattacagcatcacatccacgcagtcgtaatgatagccacctacttaagattcgtaatgaaattatggaaacatttgcattgaatcatcatcaagttgaacctgaatattatttataaggagtgagtgacgatgaaaaggttaagcataatcgtcatcattggaatctttataattacaggatgtgattggcaaagggcgtctaaagaaccgtctaataatgcccaacatcagcaagtgattaaaattggatatttgccgattacacattcagctaatttgatgatgactaaaaaattattatcacaacacaatcatccgaaatataaattagaattagttaaattcaataattggccagatttaatggacgcattaaacagtggtcgtattgatggtgcatcaactttaatagagctcgcgatgaaatcaaagcagaagggctcgaatataaaagctgtggcattggggcatcatgaaggcaatgtcattatgggacaaaaaggtatgcacttaaatgaatttaataataatggcgatgattaccattttggtataccgcatcgttattcaacacattatctcttacttgaagcattacgagaacaattaaagattaaaccggggcattttagctatcatgaaatgtcgccagcagaaatgccagccgcattaagtgaacacagaattacagggtattctgtagccgaaccattcggtgcactgggggaaaagttaggcaaaggtaagactttgaaacatggtgatgacgttatacctgatgcgtattgctgtgtgctagtactgagaggcgaattgcttgatcaacacaaggctgtagcgcaagcatttgcacaagattataaaaagtctggctttaaaatgaatgatcgcaagcaaagtgtagacattatgacgcatcattttaaacaaagtcgtgacgttttaacacagtcagcggcatggacatcctatggtgatttaacaattaagccatccggatatcaagaaattacgacattggtaaaacaacatcatttgtttaatccacctgcatatgatgactttgttgaaccgtcattgtataaggaggcatcacgttcatgacacgtctcacaattaataaaattatattacctattatcacatttattattttcttaggcatttgggaaatggtcattattattgggcattaccaacctgtattgttacctggtcctgctcttgtaggaaaaagcatatggactttcattgttactggagaaattttccaacatttagcaattagtttatggagatttgtagcgggctttgttgtcgcattgttggttgctattccattgggcttcttgcttggaaggaatcgttggctatacaacgctatcgaaccgctatttcaattgattaggccgatatctccgatagcttgggcaccatttgttgttctatggtttggtattggtagtttgccagcgattgcgattatttttatcgctgctttttttccaattgtgttcaataccattaaaggcgttagagacattgaacctcaatatttaaaaatagcggcaaatttaaatttaactgggtggtcattgtatcgcaatatattatttcccggggcatttaaacaaatcatggctgggatacatatggcggtaggaacaagttggatatttttagtttctggtgaaatgattggtgcacaatcgggattaggttttttaatcgttgatgcacgaaatatgttgaacttagaagatgttttagcagcaatattctttatcggattatttggttttattattgatcgattcattagttatattgagcagtttatacttagaagatttggtgaataaggagagatgatgatgactttagaaacacttatcaaagaacaattagatcctcatttagtagaagttgatgaagggacgtattatccgagaacatttatccaacaattatttgtagatggctattttggtgaagcgacactgagaaaaaatgctgaagtaatcgaagctgtatcgcagtcttgtttgacaacaggattttgtttatggtgccaattggctttttcaacgtatttagaaaatgccacacagccacatttaaataatgacttacaacagcaattgttatctggagaaatattaggtgctaccggattgtctaatccgatgaagtcatttaatgatttagaaaagttgaaccttgaacacacttatgttgatggacaattggttgtcagtggacgtatgccagctgtaagtaatattcaagaagaccattattttggtgcgatttcgaagcatgaatcatcagatgaatttgtcatgttcattctacgtgccaatcaagatggtatcacgcttgttgaaaaaacaaattttttaggggtaaacggctcagcaacgtatcaaattactttgaatcaagtcgcagtgccacaatcacaaattatcacgcatgatgcgaagcagtttgcggcaactattcgcccgcaatttattgcttaccaaattccaataggattaggctcaattaaaagttctttagagttaattgatgcattttcaaatgcgcaaaacggaataaatcaatatttagagtatgatgttgaaggttttaaaaaacgctatcgtcaacttagagaggaatattatgcaatattagatgacggtaacttaacttcacatttaaatgaattaatatcattgaagaaggacattggctacttattgttagatgtaaatcaagcttctgttgtcaatggtggttcaagagcgtacacaccatattcgccacaagtacgtaaattaaaagaaggattcttctttgcggcattaacgccaacattaagacatttaggtaaacttgaggcagagttgaaggggtaagtatgatatgctgatttgttgtttagatgcgcttgttgaaacaatttttaaaataatataaatcttagtttataaacattttctgttaatttgttatatccttttaactaggaaaatatacatttcgtaataataatcgttatcattgaaaaagtgttaataaggtgtataatgaaaatgtgaacaattaatgaacttcttattttagagaaggtgaatactatagatacgcatactaaagaacaacaattctcgaatctagtaagatcttatcgtaaagaatacgtgggtaaaggacccaacagtattcgagtgtcgtttaaagataattgggcgattgcacatatgacaggtgttttgagtaaagttgagagtttttacctaaacgacaaacgcaatgaatcgatgctccattatacacgcacagagaagattaaacagatgtataaagaaatagatgtaaatgagatggaaagtgttgtaggcgctaagtttgtaaaattatttacagatattgatttgaatgatgatgaagtcatttcaatatttgttttcgataagtcaatagaataagtgttgctggtgtaaggtacgcggtgctgtttgctaacttcgctttgaatttaacaataattcaagggggtggtatgtcaaacagtgccgttttttttgtcatatttttaaaacaagcaacatgcaacacgtactttaaggaagtcaaaatttatcatttaggagagatggatatgaaaatcgtagcgttatttccagaagcagtagaaggtcaagacaatcaattacttaatactaaaaaagcattaggattaaaaacatttttagaggaaagaggacaagagttcattatattagcagataatggtgaagacttagataaacatttaccagatatggatgtgattattagtgcgccattttatcctgcatatatgactcgtgaacgtattgaaaaagcaccgaacttgaaattagcaattacagcaggtgtaggatctgaccatgtagatttagcggcagcaagtgaacataacattggtgtcgttgaagttacaggaagtaatacagttagtgtggcagaacatgcagttatggatttattaatacttcttagaaactatgaagaaggtcatcgtcaatcagtagaaggtgaatggaacttgtctcaagtaggtaatcatgcgcatgaattacaacacaaaacaattggtatttttggatttggacgaattggacaacttgttgctgaaagattagcgccatttaatgtaacattacaacactatgatccaatcaatcaacaagaccataaattgtctaaatttgtaagctttgatgaacttgtttcaacaagtgatgcgattacaattcatgcaccattaacaccagaaactgataacttatttgataaagatgttttaagtcgtatgaaaaaacacagttatttagtgaatactgcacgtggtaaaattgtaaatcgcgatgcgttagttgaagcgttagcatctgagcatttacaaggatatgctggtgatgtttggtatccacaacctgcacctgctgatcatccatggagaacaatgcctagaaatgctatgacagttcactattcaggtatgactttagaagcacaaaaacgtattgaagatggagttaaagatattttagagcgtttcttcaatcatgaacctttccaagataaagatattattgttgcaagtggtcgtattgctagtaaaagttatacagctaaatagaataaggatgctgggctagcgattaacgctttcaattttatataaatgaatcatataagtactactgctgttgtaaagatggcagtagtttttttatgattacatctaagtatagtcacggctatgttaggacaatgatttaacgtttacgcacatatgtgttcacttacgcaaatgttgataaatttcactcatttggaataatatatagtcatatagtgctaatttttttgaggcattatatgcaagatgcattgtaaagtcgatacatttgtttgttaaataactttgtataactaaaaattctttgcttcaacgtataatcaaataatagattttatataaatggtagtgtgcatatatgtggataggggtgtagttatcaatgaaacgtttaagtacgactttgaaagtacgattgattagcaattttttacagctaattattacgacagcatttataccgtttatagcactatatttaacagatatgttaagtcaatcaattgtcggtatataccttgttggtttagtggttctaaaatttccattgtctattatatctggttaccttattgagatatttccgaaaaagttgctagtacttatttatcaagcgacgatggtgataatgcttgtgttcatgggcatatttgggtcacatcaattgtggcaaattattggtttttgtgttgcatacgccatatttacaattgtttggggattgcaatttccagttatggacacgttaattatggatgcaattaccgaagatgtggaacattatatttacaagattagctattggatgacgaacttatcggtagctattggagcattgttaggtggcttgatgtatggctacagtatgttactgcttttcttaatagcagcttgtatatttttaattgtactgtttattttatatatttggttacctcaagaccgaaatcaagtaaagcaaagtgatgacaagaaacatgcaagtcgttatcaaaaattacaaataatgaatatatttcgcagttataaattagttttgaaagaccgtaattatatgttattgatttcggggttcagtatcatcatgatgggtgaattttcaatctcctcatatattgctattagactaaaggatcagtttgaaacaataagtataggttcatatgatattacaggtgctaagatgttagcaatcttgctaatgattaatacggtcgtcgtcattttactcacgtattcaatctcgaaaattgtattgaaaatagattttaaaaaagctttaatcactggtttgctgatttatattgttggctatagtggtctaacctatcttaatcagtttggcttattagttgtttttatgataattgcgactgtaggtgaaattatttattcgcctatagtttcagaacaacgctttaaaattattcctaaagctaaaagaggaacatatagtgcagttaatgcattaggcattcatttttcagaaacactagctaggttagggattgtgttgggtgctttcttaacgacattacaaatgggactgtatatgtttatagttttaacaattggtgctagcatgcttgttgctggtgtattcgggggacaaaaacaagtgaatacaaattgaatttatttaaatatttattctatgcatctttttatattgaaaacctattaatttggtcgtaattaaaatagagataaatttattaagaatttgttaaaatttaaggataacaattgttttatgcgagttgtttgtttaatataaacttgcttcatggatattttgtaacaacaatattgaacttgcaatgagatatgaataagagaaagtgattaacgagttgtagtgtgctagttatcgaatatgtatgtaatttacattgaaaaatataccaattgtaacgatgatacaagatgtattttagggtagaatatatcgctcatatgttgcgaatggtgttttatattaatcattacataacgagttaattaacatttcgtcggttatcatatcatcatgcaatttcagtaagtaatgagtattatgatatgaaagaaggactttttatgattatgggcaatttgagatttcaacaggaatattttcgtatatacaaaaataatacagaatcaacgacacaccgtaatgcgtattgggttaaactcgctaaaaatattgaagctactaaaatgatgtatgcattatcgacaattgtgcaacaacatgcatctataagacatttttttgatgttactaccgatgacaatttaacaatgatacttcatgaatttctgccttttattgagataaaacaagttccatcttcttccgcaaactatgatttagaagctttttttaagcaagaattaagtacttaccattttaatgattcacctttattcaaatttaaattgtttcagttcgctgatgctgcatatatattattagattttcatgtgtccattttcgatgatagtcaaattgatatttttcttgatgatttatgcaatgcatatcgtggcaatactgttattaacaatactcgacagcatgcacatttaaatagaaatgatgataaagacaatcaagatgcatcgcatatagcattagactcaaactattttcggctagagaataactctgacatccatatcgatagttatttaccaattaagcatccatttgagcaagctttatatcaaacgtatttgattgatgatatgacatcaatagatatggcatcgttggctgttagtgtgtatttagctaatcatataatgagtcaacaacatgatgtcacattaggtatacatgtaccatcacatttaccaaatgatttacacggaaatattgtgccattaacgttaacaatcgatgcaaaagatgtatgtcaacgctttacaacagattttaataaaagtgtgttgcaaaatatgtcgcaattacagtgcgcgaagtcttcgctttcattagagactatttttcattgttatcatcaaatgatgtcttgttgtaatgatgttattgaggatgtacatcaaatacatgatgcacatacatctttagcggatattgaaatttttccacatcaacacgggttcaaaattatatataacagtgcagcatatgatttgctctcaatcgagacgctgagtgacttagttcgtaatatttatttgcaaattactaaagaaaatggaaataaacgaacaactgtagatgaacttaatttgatgacagaacgtgatattcaattatatgacgatatcaatttaagtttacctgagatagatgatgcgcaaacagttgttaccttatttgagcaacaagttgaagcaacaccgaattatgtcgctgtgcaatttgacggagtgtttataacatatcaaacattgaatgcacgcgcgaatgatttagcacaacgtttgagaaaccagtatggtgttgaacctaatgatcgtgtcgctgtcatagctgaaaaaagtattgagatgatagtagcgatgataggtgtgttgaaagctggtggggcttacgtgccaattgatccgaactatccaagtgatcgtcaggagtacattttaaaagatgcaacgcctaaagttgttatcacatatcaagtagtatatgaaaatggtaaacgagatattaatcacattgatttgaacaagatagcgtggaaaaatattgataatctttctaaatgtaacacgttagaagatcatgcgtatgttatttacacgtcggggacaactggtaaccctaaagggacactaattccgcaccgaggtattgttcgcttggtccatcaaaatcattatgtaccattaaatgaaaagacgacgattttgttatcaggaactatagcctttgacgctgcaacatttgaaatatatggtgcattgctaaatggtggaaaactgattgttgctaaaacagaacaattattaaatccaatagcgttagaacaattaatcaatgaaaatgacgtcaatactatgtggttaacctcctcattatttaatcagattgctagtgaacgaatagaagtattggtaccgttaaagtatttattaattggtggagaagtattgaatgctaagtgggtggatttgcttaatcaaagaccgaagcatcctcaaattattaatggttatggaccaactgaaaatacaacatttacaacgacgtataatatacctaacaaagttccaaatcgtattcctattggtaaaccgattcttggtactcatgtttatatcatgcaaggcgagcgtcggtgtggcgttggtattcctggagaattatgtacaagtggctttgggttggctgcaggttatttaaatcagccagaattgacagcagataaatttatcaaagattcaaatataaatcagctgatgtatagaagtggtgatatcgtacgtttgttacccgatggcaacatagattatttatatcgaaaggacaaacaagttaagattcgaggatttaggattgagttgtcagaggttgagcatgcgctcgagcgtatacaaggtattaataaagctgttgttattgttcaaaatcatgatcaagaccagtatatcgttgcttattatgaagcgatgcatacattatcacataataagattaaatcacaattacgtatgaccttacctgagtacatgataccagttaattttatgcatattgagcaaattcctattactattaatgggaaattagataagaaggcattgcctatcatggactatgtcgatacggatgcctatgtagcaccgagtacagataccgaacacttgctatgccaaatttttgcagatattttacatgtgaatcaagtaggtattcatgataatttctttgaattaggtggccattccttaaaagcaacgttagtggtgaatcggatagaggcatctactgggaaacgattacaaattggtgatttattacaaaagccaactgtatttgaactagcgcaagcgattgctaaggttcaagaacaaaactatgaagtgattcctgaagctatagttaaagatgattatgtgttgagctctgcacaaaagcgaatgtatttattatggaaatcaaaccataaagatacggtgtataacataccttttttatggcggttatcatcagaacttaatgtagctcaattgcgacaagcagttcagcatttgatagcgcgacatgagattctacgaacacaatatattgttgtagatgatgaggttcgacaacgtattgtggcagatgttgtagctgactttaaagaagttaacacgcattttacggatgaacaagaaatcatgcgccaatttgtggcaccttttaatttggaaaagccaagccaaattagagtgagatacattcgaagtccattacatgcatacctgtttatagatacacatcatattattaatgatggtatgagtaatatacaattaatgaatgatcttaacgcattatatcaacataaattattgttaccacttaaattgcaatataaagactatagtgaatggatgtcgcatcgtgatatgacgaaacatagacaatattggttatctcaattcaaagatgaagtacctattttaagcttaccgacagactatgttagaccaaatattaaaacgacaaatggagcaatgatgtcatttacaatgaatcaacaaatgagacagctacttcaaaagtatgtagaaaagcatcaaattactgattttatgttctttatgagtgtggtcatgacgttgttaagcagatatgctcgaaaagatgatgttgttgtcggtagtgtcatgagtgcgcgtatgcataaaggcacggagcaaatgctaggcatgtttgctaatacgttggtatatagagggcaaccgtcacttgataaaatgtggacacagtttttacaagaggttaaggaaatgagtttggaggcatacgagcatcaagaatacccattcgaatgtttagtaaatgacttagatcaatcacatgatgcctcacggaatccattatttgatgtcatgttagtactacaaaacaatgaaacgaatcatgctcattttgggcatagtaaattaacacacattcaacccaaatcggtgacggcgaaatttgatttatctttcatcattgaagaagattgcgatgactatacaatcaatatcgagtataataccgatttatatcactcagaaacagttcgtcacatgggtaatcaatgtatgattatgattgattatattttgaagcatcaagatacactacaaattcgtgatataccaaacggcacggaggaacttttaaattgggtcaatacgcatgttaacgatcgaatgcttaatgtcccgggaaataaatctatcataagttactttgatgaagttgtctcacgacaaggtaatcatgttgcgctagtcatgaatgatttgacaatgacgtatgaaacattacacaactatgtagatgctattgcgcacatgctcctatcaaatggtgtgggcaagggtcaacgagttgctttaataacagaacgtagttttgaaatgattgcggcgatgttggcgacagttaaagtaggtgcatcttatatacctatcgatattgattttccgaaaaagcgacaaggtgcaattttggaggatgctaaagtaactgcagtcatgtcttacggcgttgaaattgaaacgacattaccagtcattcaattggaaaatgctaaaggttttgttgaatcaaaggaaaatgaacaatatgatgatttacatggcgatcaactcgaaaacacagcgatgttagataatgagatgtatgctatttacacatctggtacgaccgggatgcctaaaggggttgccatacgacaacgaaatttgttgaatttagtgcatgcatggtcaactgaattgcaattaggcgacaatgaagtatttttgcaacatgcaaatattgtttttgatgcatcagttatggagatttattgttgtttgttaaatggtcatacgcttgtgattccagatagagaggaacgtgttaatccagaacagttacaacaactcattaataagcatcgtgtgacggtggcgtcgattccattacagatgtgtagtgttatggaagacttttatattgaaaaattgattacaggcggggcaactagtacggcatcctttgttaaatatattgagaagcattgtggcacgtatttcaatgcctatggaccatctgagtcaacagtcatcacatcgtattggtcacatcaatgtggtgatttgatacctgagacgattccaattggcaaacccttatctaacatccaagtgtatattatgtcagatggtttgttatgcggtattggtatgccaggcgagttgtgtattgcaggtgatagtttagcgataggatatattaatcgtccggaattaatggctgataaatggcaaaataatccatttggtaaaggaaagttgtatcatagtggtgatttagcacgttatacatctgatggtcaaattgaatttttgggaagaatagataaacaagtgaaagttaacgggtaccgtattgaacttgatgaaattgaaaatgcaatattagctattcgtggtatatctgattgtgttgtcacagttagtcactttgatacgcatgatatattgaatgcttattatgtcggagaacaacaaatggagcaggatttgaagcaatatttaaatgatcatctgcctaagtatatgattcctaagactataacgtatatcgattgtataccattaaccacgaatgacaaggtggatactacgcgtttgccaaatccatcacctatacaacagtctaataaagtatatagcgaaccatctaatgaaattgagcagacatttgttgatgtattcggagaggtattgaaacaaaatgatgtcggtgttgacgatgatttctttgaacttggtggtaactcattagaggcgatgttagttgtctcgcatttaaaacgatttggccatcatatttcaatgcagacattatatcaatataaaaccgtgcgacagattgttaattatatgcaccaaaatcaacaatcattagttgcattaccggataatctttcggaattacaaaagattgttatgtctcgttataatttgggtattttagaggatagtctaagtcatcgacctctaggaaaaacactattgactggcgctacagggtttttaggtgcttatctgattgaagcactacaaggatacagtcatcgcatttattgtttcatacgtgctgataatgaggaaatagcatggtataagttgatgacgaatttaaatgattatttttcagaagagacggttgaaatgatgttatcaaacattgaagtcattgttggtgatttcgagtgtatggatgatgttgttttaccagaaaacatggatacaattattcatgcaggtgctcgtacagatcactttggtgatgatgatgaatttgaaaaagtaaatgttcaaggtactgttgatgtcatacgtttggcacaacaacatcatgcaaggttaatatatgtgtctacgataagtgtgggaacttattttgatatagatacagaagatgtgacattttcagaagcggatgtctataaaggacaactactaacatcaccatatacacggagtaaattttatagtgaattaaaagtattagaagctgtaaaaaatggcttagatggtcgaattgtacgtgttggtaatttgacgagtccatacaatggaagatggcatatgagaaatataaagactaaccgtttttcaatggtaatgaatgatttgttacaactggattgtatcggggttagcctcgctgaaatgcctgtagatttttcttttgtggatacgactgcaagacaaattgtcgcattagcacaggtcaacacgccacaaatcatttaccatgtgttatcacctaataaaatgccggtgaaatctttattagaatgtgttaagtgcaaagaaattgaactcgtcagcgatgaatcatttaatgaaattttacagaaacaagacatgtacgaaacgattggattaactagtgttgaccgtgaacaacaactagcaatgatagatacaaaattaacattaaaaataatggatcacatcagtgaaaaatggccaacgataactaacaattggctgtatcattgggcacaatatatcaaaacaatattcaataagtaagtagggaaagttatgacagtatttgtaatgcaattacagagtaacttgaaaagtattgaagaattaatatcacaaagtcgttggtcatataaaaaaccgcgtacagtcaactatagatacaatcaagataaactcatgcacagattgggagatattttagtgcaatatggaattcaacatgacacagggttattaccacatgaatggcattatcacatttcgccacgaggtaaggcagatatagttcaacacaatcgtgatggacagcccatctatgtgagcttatcatatagttatccttatatcgtgtgtgttgtcgataaagaaccagttggtattgatatcgaaaagatatcacaacgtttagactggcgtacattagtgacgtgtttctctacaaacgaagcacatcaaatatgtagtttaaatgatttttatcaaatatggacacaaaaagaaagttttacaaaattgattggtgaaggtttaatcaaaggattggacatttatgatatgacgcaatcacacttttatcaatcacgtgaagtgaagttcaaacaatttatttttgatcagtttatggtacaggtatgtttcttaggacaggcaccctggggttataaaaaagtgtctgtatttcagttattgagtagttaaacatggcgtctaacagttttatttggcagtgattttaaactatactgcctaaatgtttactgttagatgtttttttattggaaaaatgaaaggtgaatacacgatggcatcattcaaaatcatgacgagattaaagtaagtgataaggtgaaaatatactgagcaatattgaaattgccaaaaataatggcttgttacgacgcatttgagactttaatgctcatgtaagttggctagaattatatcatgtcagttaataaaataacgtgagcatcaatcatcatactcaaacgatgatttaaaactcacgttaatgttagtcagtgtattaatttaatttatagcgatagacaaaatgttgtcgcactaattcaattgtcatcatccagacgatatggccaaagaattctgacagatgctcttggaatggttgatcccacacagcaggtacagtatgcatgattggcataatgataaggtggaataatacccaaatagcaataccaaaaacagcaccttgtcccattgctaagtaagcgtattttttaactaatatgcagtaaataattgcaatgacgatagaaaaactaaagtggacaataaagcttacccaaggcaattgcatatttgaaaatgtatatgtttgatgcgtaaactcactactaaatcctaattgttgcaataactcttgaggtgggttcgttgcattacgttctggtgtgcgaggtggaaacatgacctcccaacctaattttacaattccagataacaagccaccgataattccagcataaatgaatatacccatttgttgttttgtcaacttaaggactcctctctatttactatcctcattatagtattttgtgaaaataatcacaatgaaaaacttttaaaatataaaatatttcgagttacaaatttgaaaatcacttatagtgtttttcatctcatattgtatcatactgtattctaagaattcttttgtgaaatgagacaggtgaaaaggtgacgctgcataatcattaaacaaattaggtacaactatgtttcgaagccgaaaaatacaagattgagtggtcatattcaaagtcatactgatgattttagtatcgttgtcccaacaaaatcattattgtaaatagcttcgataatatttggcttgtttcctgatgcaatgataactttaggacagccatttttaatagcatttttagcatcaagcactttgggaatcatacctccataaatatcaccatgctcaatatactgattaatatcggctaagggtagttgaggtataacaacatcgttgattagcacgccagcaatattacttagtacataaatgggtgcttctaatgatgctgcaataaaataggcgagtgtgtctgcatttatgttgtaaaattctccatcatggttattgaaaccaatcgaattgatgataggtacaaatttagtacataaataagacaatgagtctatatttaaagtggttggaaccccgacatatccatattgttgatcaaaacgtttaatttcaaataattgagcatccaaaccacataagcctattgcagaacattgctgctggttaaattgagctactaatgcagtgttaacgtctgcaatgagcgtgtgtttagtaatagtcatggttgctttatcagtcactcttaggccattaacaaagtgtggctcgatttgctggtttgataatgcttcattaataaatgggccaccgccgtgaacgataatggggtagatgttgtttgatcgtaaatgcttaatgttgttaataattgatggatgcatgtcacttagtgtactgccaccaattttaatgacaataaatttcatctaaccaacaccaccttatgttcgatatgatgcgttaatacgcacataatcataggataaatcacaaccgtatgcagtcgctgcagcgttacccaaaccaagctgaacgtcaattgtgacattttcatgagttaatgtattcgacatagcttgctcatcaaatagtacagccatacctttatccacgacaggtatttggttcagttgaacatatgtgcagttaggatcaatttcacatccgctatagccaatagctgtaatgattcgaccaaaattggcatcttcgccaaaaatagctgattttactagatttgaacttacgatagttttaccgatttttcttgcgtctgatattgatttagcgcctgaaacattgacactgattaactttgttgcgccttcgccatctctggctatagctttagctaaaaatgtacagacaaaattgaaggcatcaacaaatgtttcccattgtggatggtcttgattaagtatttggtgttcaacttgttgatttgccatgactaataccatgtcatttgtacttgtatcgccatcaacagtaatcatattaaatgtatggtcagtcgaagattttaataattgatgaagtgtattcgattcaattgatgcatcggttgttataaaagcaagcatggtagccatatttgggtgaatcatacctgatcctttagcactgccaccaattgtaatggttttaccatcaatatttagtgatacagcgatatgctttgtacatgtatcagttgttaaaattgcctcgttaaacgcacctggcgttgcaaaattagcatcattaatatgttctgtaccagttttaattttatccattggcaaatattctccaataacaccagttgaagcaacagcaacatgctcagatggtatttgaagttgttgagcaacccatgtttgagtttgttgtgcatcatcgataccttgctgacctgtgcaagaatttgcattagctgaattaacaacaagtgcttgtaatttccctttagacttttgtaaagtgtcttcagtgacaataagtggtgcagctttaaattggtttaaagtatatacggcagctgaacttgctaaagacgatgagtaaatccagccaaagtcttttttgttagcgcgtaaaccgatgtgcataccaccggccgtgaagccttgaggtgtactgatatcgccatgtttaataattgaaaagttatgttgttgtgatgtcgtttcttgatgtttcattctaacaccccttatggataaactggtgattgttttaggccagtcgtaacttcaaaatcatataatatatttaagttttgaatggcttgaccacttgcccctttgacaaggttatcaatcactgatactaaaattgctgtttgcgttgtttcatctacatagataccgatatcgcagtagttactaccgagtacttcttttgtggttggaaaagtcccaatatctctaattctgacaaatggctgattagcataataagaggtcattaatttatgtaatgattcagtcgtatattcagatgataatttgacatatattgttgataaaatacctcgtgtcattggtacgagatgtggtgtaaatatgactgatacatcttgacccgcaatgatagataaatattgctcgatttccggtttgtgtttatggtttccgattgcataagcgcttagattttcattcatttctgaaaaatgaacacgttgtgataatgaacgaccagcacctgacacgccggtcttagcatcaataataatagatgacaaatctacaattttttcgctaataagtggatgtaatgctaataacgttgctgtagggaaacagccagggttagaaatgagtttcgttccattgttatctaaagattgccattctgaaatgctgtaaatagcatgattcaaatcatcttgtgctgcagcagtttctttgtaatatgcttcatatatttcacggtttttaattctgaatgcaccagataaatcaataacatgaattcctttttctactaaaggagggatacatgttttactcacgggtgctggtgtagcaaagaaaattacatcacagtcattattgtccactgtaagtgcttcgaaatgttgcataatatgttgtaaatgtggaaatgttaatttcaacggctcatctacttttgaatgtgagtagatgtgtgcaatcgttacatgaggatgtgtttgtaataatcgaattaattcaattgcgccataaccgctaccgccaacgatacctactttaatcatcatgaatccctcctatatcatatataaatgattaattgttaatttttaaaaacgtcttgaaaagctgcaacaatttgattgatttcctctttatcaatgactagaggtggtgacaatcgaatgatagtacgatgcgtgtctttgcataaaatgccacgtttaatcagttgttcaacgaaaggtgcggcatctgtgttaagttcgatgccaataaataaaccacgacctctaatttctttaatactaggatgtttaagttgtagcaacgcttttaataaaaatgaacctaagcgttctgatcgttcaaccagttgttcatctttaagtacatcaagcgctgccgtcgatattgcaatggctaaagggttaccaccaaatgttgagccatgtgtacctggtgttagaactcgcatgacatcattatttgcaagcacagcagatacagggtataagccgccacccaatgccttacctaaaatataaatgtctggaacgacttgctcccattccatcgcaaaccatttcccagttctaccaagaccaacttgaatttcatctgcaatcaataatatttgatgtttatcacatagttgacgcacagcttggatatatcctttcggtggtatattaacgccaccttcaccttgaattggttctaaaataattgctgctgtatttggtgaaatagcttgtgttaattgctcaatatctccaaaatctactgttttagtaccttgaagtagggggtgaaatcctgatttatatgcgtcgtggttagatagtgataatgagccaagtgtacgaccgtgaaaattgttattcatagcgatgatttcaacttgtccgtcagtgatgcctttaacgtcagagccccattttctagcaattttaatggctgcttcaacagcttcagtaccagagttaagggggagtactttgtctttcttagcaagatgacaaattttttcttcccatttcccgagattgtcactataaaggacacgtgaaatgatagacaactttgaagcttgttctgtcatcgctttaacaattgttggatgacaatggccttggtttgcaactgaaaaacccgaaatgcaatctatatattgtttgccatcagtatcccaaactttgccccctttcccttcagtaattacaagcttcagtggtgcataattattagagctataataatcagttaattcaatgattgaattcatcggtcgccctcctttatatttatacaatttaaagaattaatattaatatattacagttgttcaatataagtgtcaaatgtaaatttaataatataaagataaagttgtgtatgcattaatgtgattcgtaaaatgaaagtactaatatttttcgtggataatcattaatatgtatgtatacgagtgcagtttaatgtagtatgaataaaaaatgccacaagcatatgtttaacatatgactgtggcatagtattatgcttgtggaattttacgatgcttaattttataaataatgaagccgataatgaaaccaatcaaactgagaacaacccagcccataccaatgtctgataatggtaaatatttttggctgaaattaatcaaagtttgtgagaatgatgtgcttgaaatgaactctggactagcttttaatccatctactaatgcagcaatcattgtaaagaaaatggtacattgataaataatttttgaatgatggaatttgctgctaaataatgttagtacaatcagggcaattgctaatggatataagaacattaacactgggactgagtacataataattttagttaagccaacattcgcgaataagaatgagataaagctcacaactgttgcaatcgctaggtaattcattttagggaaaaggtgttcaaatgtttctgaaaatgccgtaattaaaccgatagctgtttttaaacaagcaaccataacgatgagtgataacaagacgataccgtagttacctaagtagtattgcgtaatttgcgctaaggcaataccaccattttcactaagtttgaaatgaccaatacttaatgtacccatgattgctagtagggtataaatgatccccatcataatgatactgatagtaccagacttaattgtttctttagcgatatcagttggattttcgatacctaactttttaatcgttgcaacaatgatgataccaaatgccaatgacgctagcgcatctaaggtattgtatccatctaaaaagccgttaaataaggcgtttgattgatattgtttactaataggtgcatcagatatgccacctaatggatggataaaagcaaataataaaataattgctaataatactaagaataccggatttaaaaatttaccgatatattctaaaattcttgatggctttctcgcaaaaaaccatgcaatcacaaagaagacgaagctgaaaataaataaatataaagtgatttgctttggtgataaaaatggcgaaaatgcaatttcaaatgatgtagttgccagtctaggtaaggcgaaaaatggtccgataactagatataaggcaatcgtgaaaatataagcatatgttttattaacacgcgatgcaatttcaaataaaccagatgtctttgaaataccaatagcaatgatacctagaaatggtaagccaattgctgtaattaaaaatcctaagttagcgataaaaacgttagaaccagcagcttgacccaagtgtattgggaagataaggttgccggcaccaaagaataaaccaaataacatagaaccaataaacatgttttctttaaatgttagtttcttcttcatatatgtatttgttctcctttttagaacttataaaaatctacttaattaagataatatcaaaaattaaacctaaagtgatacataattttgtaataaatactaaattttttgaaaattccggaataaatactgttttttatgtagtaagggcataggttaagaacggtttaacagatatagaatatgtttatatagtggaggttagacaacccgacgtattaatacattgtgaaataaagatacccccttcaatataatcgaagggggaagtgaatgtttagttcaatatatttagcaagtcgtttgtggttatggtttgtcccatcaatgggaatacattatctattgggaattgatgtagcgtttcgttttgtgcactcatcatatctgtaacaaaatactgatcgtagtttaattgataggcgtctcgtgctgtcgtatctacaccaacatgtgttgctacaccgccaagaacaattgtatcaattcctcgacgtctcaactgtaagtctaaatccgttcctacaaatgcactaaattgtcgtttatctatgacaaaatcgtcatctcttttgtctagtaaataatggaaatggctgtagtcatcgccttcttttggtggtaatgagatcattgcatttggttgcaatgcatctttaccatcatagaaattcacgcgaacaaaggcgataaagccattgttttttctaaaagcttcaattaatttgttagcattttgaacaacattttcagctgtatgtggcgcataatccattttaagaataccttgttgcaggtcgattaacactaaagcggttttatcaaaattaatcatcttatatcagagtccttttcatttaataatatattcgcttaaacttataccctgaatacgatgaaattatttattttgttgtgaaaaagctttagcaatatcgatcagtttcttcggtgcatcttcgacagacattttgacttcgacaaaatacatcacatcgggatggccattaattgtattaaatacctcttgtaaatcttttgatgattcaacgtcatgaatttcaacatttttaccaccaaatacagctggtaaagctttataatcccacatgtgaatttcattataaggttcatacatgccgtgaataagtcgttctaccgtatagccgtcattattaatcacaaataataccggtttaatatgctgtctaatcatagttgaaatagcttgaacagttagttgcaatgagccatcgccaattaataataagttacgacgatctttgtctgctaattgtgaacctaatgttgcaggtaatgtatagccgatagaaccccataacggttgccctataaaagtattgcttttgtataatgctaaatcataagcaccaaaaaatgatgtaccttgatcagcaataatgacatcatttggttttaagaaattttgcatcattttaaaataagtttgttgtgttaatggttctgtgccaacagtataatcgggtgatgttggacgatgatatgcaggaaacgatgcgttattcgtatatgatatatcggtcaattgttgtagtaatgatgatagagatatttcatcatttgtaacatcatcaattttgatattgtgatgatttaacataacgacatcatcgatattgaattggtatgaaaatcctgctgttgctgaatctgttaatttggctccaatatttaaaattaaatcgctgttgtccacataatctcgtattttatcttcggcaattttcccatcgtaaatacccatataatatggattttcctcattaaaagcaccttttcctaatgaaagttgtgctactggtatctgtgtttgatttacaaaatcttctaattcttgatggaggtgaaaactgttaatttcatgtccagtaatgatgataggctgcttcgattgatgcaatttagatactaataactctatatatgttgatgcatcagtatctttggctgccgttacttcgaatggtgtcggtatctcaatttcagagattgcgacatcgattggtaaatgtaaatgaactgggcgtctttcggcgattgctgtattaattaagcgtggtatttcagttgctgcattttcaggtgtgatataaccttgtgcaacggttatatgtgcaaacatttttcggtagtcgtcaaatgtaccttcaccaagtgagtgatgtacatatttaccggcttgttcaacagcacgtgtcggcgcacctgtaatcgcaatgacaggtatgcgttcagcatacgaacctgcgataccgttgacggcacttaattcgccaacaccaaatgtagtaactaatgcagcgagtccattaagacgggcataaccgtccgctgcgtaacttgcgtttaattcatttgtatttcctacccaatctacattgggattactgataatatcgtctagaaaagcgagattaaaatcaccaggaacaccaaaaattttatcgacgcctgctcgatgaatagcgtcaattaagtaagctccaatgcgttgtttcataaaaaaaccaccttttctctatatttacacttaaaatgatagcctcgaatatagtgtaaggtcaaggaagttgactttgttgtgaaaacgctaacaatattgagcaattaatattttttaggaaatgagtatgaagggggatttaattgatgattttaaaattcaaaatttaaggggagagcgaactatcaatgatgctgcaaaacacaatcgcaatgaaaaaacaggcgcgtcaccttatgaaggtatacgcacctgtttatagtaagcattatttagcttcaaataattgatcgccaaatgaaatgttgccatgttcaccttgtttaaaatcaaggtttgtaatgtttccttgtgtaacgataataggcgtaatatcactctttgcatgattgcggatgtagtctaaatcaaagttgattaataaatcaccttgtttaacttcttgaccttcctcaacatgtaaagtaaagccttctccgtttaatttaacagtgtctaaaccgatgtggattaatagttctaaaccactatctgatacaagaccaattgcatgttttgttgggaaaatcatttgtactttaccgttgaatggtgcacgaacttcaccttgtgaaggtttaatagcgataccgtcacccatcattttttcgctgaacacttgatcaggcacttctgataatggtgttacttcaccagttaatggtgcatgcacgatatggctcaattcgcttgttgcagatttatcttctgcaacaacaacggtttcgtctttatcgtcttccatagtagtagggttttctactacttgaccattcataatctgttgcatttcatgtttgatttggtcagattttggaccaaaaattgcttgcatattattgccgacttctaatacaccagatgcgcctaaatctttcaaaccaggaacatcaactttagatttgtcgttaacttcaacacgtagacgtgtgatacaagcgtctaaatgtttaatgtttgctttgccacccatagcttctaatactgcatatggtaattcagttgctgaagcagtagccgcttgtgattgtttatcttcacgacctggtgttttgtattttaattttacaattaggaatcggaatacgaagtagtaaatgactgcgtatacaagacctacaggaatgactaaccaccattgtgtcttattaggtagtataccgagtaagaagtagtcgatgaaaccacctgagaatgtataacctagatgaagatctaataagtacaatgttaagaatgataaaccatcaagtactgcgtgaataaagaataataatggtgctacgaataagaatgagaattctaaaggttctgtaataccagttaagaatgatgttaaagcagcagaacccattaaaccggctactactttcttgttttcaggtttagctgtgtgataaattgctaaagctgctgcaggtaaaccgaacatcataacagggaattcaccttgcatgaatttaccagctgttaaatgtgcaccttcacgaatttgttcgataaagatacgttggtcaccgtgaataatttcacctgctgcatttttccatgaaccaaactcgaaccagaacggtgcgtggaaaatgtgatgtagaccgaatggaattaataaacgcttgatgaaaccaaataagaatacggcaacaccagtatttgagtctaataatcctgtactgaatgcatttaatcctgtttggattgttggccagattaatgccattgggaatgctaaaataaatgatgttgtagccatcataataggtacgaaacgcttaccagcgaagaaacctaaataagatggtaagttaatgttatagaacttgttataacaccaagctgccagggccccgattataataccgccgaacacacctgtttgtaatgttgggatacctaaaatgctagcgtaaccactcgctggatcaccaatgttcttaggtgttacttgtaaaaagtcacccattgttttgttcatgattatgtaaccgacgaatgctgcgatagctgctacaccatcaccgccagctaatccgattgcgacacctaatgcgaaaatcataggcaagttatcaaaaatgataccaccagcacctgtcattaatttagcgacagtttgtacgccaccattttgtataaaaggcaagtagtgttgtaatgcttcgccttgcatagctgtaccgatagctaataacagacccgctgctggtaaaatcgcaacaggtaacattagtgccttaccaatacgttgcaattgaccgaaaagtttcttcctcacttgtccaacctccaaagttgtatttattatttaagattcaataaaaaagacacgagcaaatagactgtgttggtaaccatcacagcttaatttaactcatgcctaatcttacttagtaacacgttggtgtatgtaattaatgtaaaagaagcaattgactaagtagtatataaaacggatacgttagtttatctagcttaccatcacatcttattgaatcttatttgtttgcgactcctattttagcatggtgaagtatgcgttttcaatacaattattaaattcaatttcaaatctcttaattgttcacagattattattaaaacataatataagataatcctgaataaaatgtataaaagttgttgtaacaattcagcaatagcaactgttttcgagcgttaaatgataagaaaaatatgtcgtttaaaaaaattaacttgtgacagaaatatgtaagattattacaatgaacaggctttatctgattaatattgtaatgtgttttctcttatagtaaaatgtaagcgattacacaactcaactatattttcctaataattatattgttaaggagggctactttgacaggcttttcagtgtatttaggacaacctttagatgaagcgtatattaagcgaatgattaaacaaggttaccaaatgatttttacatctgtacaaataccagaagaagatgacgagacaaaatatcattatttcacaaaactactcaatttattaaaacatgaacaagtgacttacctcatagatgctaatccatctatattaacaccatctttttatgagcatcttcgacaatatgatgcacaatttatgattcgtatcgatcatagtacatcaattgaggcaatcgaagcgataatggcacagggtttaaagtgctgtttgaatgcaagtattatttcccgggaattgttaacaagcttacatcaacaattgaatgattttacattactttcattttgtcataactattatccaagaccagatacgggattatctgttgacttggtcaataagaaaaatgaactcatttatcaatttaatccaaaggcacaaatatatggttttattgtagggagtggtttgcgaggtcctttgcataaaggcttgccaacaattgaagcaacgagacatagtcatcctgtcgttgcagctaaattattacaagaaactggtgtatctgaagtgttagttggagactcattgattgaaataaggcaggcaaaacaacttatagatttttgtaagcataggcatttcacgttatgtattgaagaagtgtttgatacgacagtgacttaccttttcgatatgtgtcataaagtacgtccggataatccggagaatgtcattcgttcggaaacgtcaagacaaatatgtccgcattcgattcaaccacagtttacgacgcaacgacgcattggttcagtaaccgttgataatttgaataacggacgttatcaaggtgaaatgcaaattgtgagacaaacgcttagtgcacatgacagtgtgaatgttgttgcacaaattattaaagaagacttaccactgttaagttgtatcgagccgaatgatacatttgattttcaaaaaactagggagtgtaagaagtgatggaaaatagtacgaccgaagcgcgtaatgaagcgacgatgcatcttgatgaaatgactgtggaagaggcattaattacgatgaataaagaagatcagcaagtcccgttagcagttcgaaaggcaataccacaattgacaaaagtaattaaaaaaacaattgcacagtataaaaagggtggacgattgatctatatcggtgcaggtacaagtggacgattgggtgtcttagatgcagcggagtgtgtacctacattcaatactgatcctcatgaaattataggtattattgctggtggacaacatgctatgacgatggctgtagaaggtgcggaagatcacaaaaaattagcggaagaagatttgaaaaatatagatttaacatcaaaagatgtcgttataggaattgccgcgagtggcaaaacgccatatgttataggcggtttaacatttgctaatacaatcggtgctacaacagtatctatttcatgcaatgaacatgcagttataagtgaaattgcgcagtatccagtagaagttaaagttggtccagaagtattaactggttcaacgcgtttaaagtctggtacagcacaaaaattaattttaaatatgatttcaaccatcacaatggttggtgtcggaaaagtttacgataacctcatgattgatgttaaagcaaccaatcaaaaactgatcgaccgttcagtgcgtattattcaagaaatatgtgctatcacatatgatgaagcaatggcgttatatcaggtatctgagcatgatgtgaaagttgcgacagttatgggtatgtgtggcatttctaaggaagaagcaacaagacggttattaaacaatggtgacattgttaaacgagcaatcagagatagacaaccttaggagggatttaaatgaccaaagaacaacaacttgcagaacgaattattgctgcagtaggtggtatggataatatagatagtgtcatgaactgtatgacacgtgtgcgtattaaagtattagatgaaaataaagtagatgaccaagaactaaggcacattgatggtgtcatgggtgttatacacgatgaacgcattcaagttgtagttggacctggtacagtcaataaagtggctaatcatatggctgagttaagtggtgttaaactaggtgacccaataccacacaatcacaatgatagtgaaaaaatggactataaatcatatgcagctgataaagcaaaggcaaataaagaagcacataaagcaaaacaaaagaatggtaagttgaataaagtattgaaatcaattgccaatatctttataccgttgattcctgcatttattggagctggattaattggtggtattgcagcagtactgagtaacttaatggtggcaggctatatttcaggtgcttggattacgcaacttataacagtatttaatgtcattaaagacggtatgttagcatacttagctattttcactggtattaatgcggctaaagaatttggtgcgacaccaggacttggtggcgtgattggtggtacaacgttattaacgggtattgctggtaaaaatattttaatgaatgttttcactggagaaccattgcaacctggacaaggtggaattattggtgttatttttgccgtttggattttaagtattgtcgaaaagagattgcataaaattgtgccaaatgcgattgatattattgtaacgccgactattgcattgttgattgtaggactattaactatctttatctttatgccattagcaggttttgtttcagacagtttagtttcagtagttaacggaattattagtattggtggcgtatttagtggatttatcattggtgcaagcttcctaccgttagttatgttagggcttcatcatatttttacgccaattcatatagaaatgattaaccaatctggtgctacttacttattgccaattgcagcgatggctggtgctggacaagtaggtgccgcattagcactttgggtaagatgtaaacgcaacacaacattacgtaatactttaaaaggtgcattgccagttggtttcctaggtattggagaaccattaatctatggtgtgactttgccattaggtcgacctttcttaactgcttgtattggcggtggtattggtggcgctgtaataggtggaattggacatattggtgccaaagcaataggcccaagtggtgtgtcactattaccattaatctcagataatatgtatttaggttatattgcaggattacttgctgcgtatgctggtggattcgtttgtacatatttatttggaacgacaaaggcgatgcgacagacagatttgttgggtgattaatgatgacaaatattttatatcgcattgataagcagttgagtgattttacgaagacagaaaagataatcgctgattacattttaaagaatccacataaaatcattgatatgactgtgaatgatttagcagatgttacgaatgttagtacagcatcaattgttagatttagtcggaaaatgacacatcaaggttttcaagagctaaagattgcgatatctcgatacttacccgaagatattgcaaccaatccacatttagaattgattgaaaatgaatctgtagaaactttgaaaaataaaatgattgctagagcaacgaatacgatgcgatttgtagctactaatattatggatgcgcaaattgatgcaatttgtgatgtgttgaaaaatgccaggacaatatttttatttggatttggcgcatcgagtttgactattggtgatctttttcaaaagttatctcgtattggcttaaatgtcaggttattacatgaaacgcatttacttgtgtcaacatttgcgacgcatgatgatagagattgcatgatttttgtgacgaatcaaggtagtcatagtgaattgcagtcaattgcacaggtggccacacattacagtattcccatcataactatatctagtacagctaataatccagtggctcaaattgcagactatgcattgatttatggcagaactgatgaaaatgaaatgcgtatggcggctacaacgtcactatttgcacagttattcacggtagatatattgtactatcgatttgtagcattaaattatcatgcgattctagattgtataacccaatcgaaaatggcacttgataattacaggaagcatcttgcgacgatagattttaaacattagatattgtgtgcgttctaatataaagttagttgcaacgtaaacaattgaagtttttgatgtgatttagttgcttgatgaaaaattgttgatacaagtttgtaaaactggcatagaagttattttgaaaatgataaaagtgtgacaaattaaagcaaagttcaggtttgagctttgcttttttcatagtatagaaattaaatgttgaagaataattttaatgctaaatgaactaatacgaaggtgctaaaagtaattattatcaaattagtgatatgaatgaaatgtttaaatcgtttgcgttgattgtattcgggacttttatagagtaggtagtagtacataaagagtatggctgcgaacatgccgaatattgaagtgaagttacctacagtgactgccatgaaatgatttaaagttaaataataacttagactgataattaaaaataaaatgatttgataggtaattaacaccattcaagtccctccattaatcgtaggcaaaaaatttatcaatgatttgattatttgtattcaaattttagtatacgacttacctcaaacacaaatattaaaatataagacaataaaattagaataaatttacgtttgaagataaaaaacaaacatttttcattaaagtttatgatatatttagagcaatagaaagtgtatggaaggggatatgaatggcataccaaagtgaatacgcattagaaaatgaaatgatgaatcaacttgaacaattgggttacgaaagagtaacgatacgtgataataagcaattgcttgataattttagaacgattttaaatgagcgtcatgcggacaaattagaaggcaatcccttaacagataaagaatttcaacgtctgttaacgatgattgatgggaaaagtattttcgaaagtgcccgtattttacgtgataaattaccacttagacgtgatgatgagtctgagatttatttgtcgtttttagatacgaaaagttggtgtaaaaataagtttcaagtgacgaatcaagtatcggtcgaggatacatataaagcacgttatgatgtaacgatattaatcaacggactaccccttgtccaagttgaattgaaacgtcgaggcattgatattaatgaggcgtttaaccaagtaaaacgttaccgtaaacaaaattacacaggcttattccgctacatacaaatgtttatcattagtaatggtgttgaaacgcgatacttttctaataatgatagcgaactattgaagagtcacatgttttattggagtgataaacagaataaccgaatcaatacattgcaatcgtttgctgagtcatttatgagaccttgtcaattagctaagatgatatcacgctatatgattattaatgaaacagatagaatactgatggcaatgcgtccgtatcaagtgtatgcggtagaagcacttattcaacaagcgactgagacagggaataatggatatgtgtggcatacaacgggaagtggtaagacgttgacttcttttaaagcgagtcagattttatcacaacaagatgacattaagaaagttatctttttggttgaccgtaaagacttggatagtcaaacagaagaggaatttaataaatttgctaagggtgctgtcgacaaaacatttaatacctcgcaactggtacgccaactaaatgataaaagtttgccacttattgtaacgacgattcaaaaaatggctaaagcgattcaaggtaatgcccatttattagaacagtataaaacaaataaagttgtatttattattgatgagtgtcatcgcagtcaatttggtgacatgcatcgtctagttaaacaacatttcaaaaatgcccaatattttgggttcactggtacgccacgtttcccagaaaatagtagtcaagatggtagaacaactgcagatatttttggtagatgtttacatacgtatttaattagagatgccattcatgatggtaatgtacttggtttctcagttgactatattaatacttttaaaaataaagctttaaaagcagaagataacagcatggttgaagcaattgatatggaagaagtatggttagcggataaacgtgtggaattagtaacacgacatatcatcaataatcatgataaatatacacgtaatcgtcaatattcaagtatatttacagttcaaagtattcacgcgcttattaaatattatgagacatttaagcgacttaacaaaaagttggaacaaccattaacggtagctggtatatttacgtttaaacctaatgaagatgatcgtgatggtgaagtgccatatcattcacgtgaaaaattagagataatgattagtgattataataaaaagttcgagacgaatttttcaacagacacaactaatgagtattttaaccatatttcaaaaaacgttaaaaagggcgttaaagatagtaaaattgatatcttaatcgttgttaatatgttcttaactggttttgatagtaaagtactgaacactttatatgttgataagaatttaatgtatcatgatttaattcaagcgtattcacgtacaaatagggttgaaaaagaatcaaagccatttggtaaaattgtaaactatcgtgacttgaaaaaagagacagacgatgcactgagagtattctcacaaacaaatgatacggatacaattttaatgcgtagttatgaagagtataaaaaagaatttattgacgcttatcgtgagcttaaaatgattgtgccgacaccacacatggttgatgacattcaagatgaagaagagctaaagcgctttgttgaagcttatcgtttattagctaaaataatattacgtttaaaagcatttgacgagtttgagtttacaattgatgaaattggaatggatgaacaagagaatgaagactataaaagtaaatatttagccgtgtacgatcaagtaaaaagagcgacggctgagaaaaataaagtatccattttaaatgatattgatttcgaaatagaaatgatgcgtaatgatacgattaatgtgaattatattatgaatatattgagacaaattgatcttgaagacaaagcggaacaacgtcgtaaccaagaacaaattagacgtattttagatcatgcagatgatccgacattgaggttaaaacgagatctaattagagaattcatcgacaatgttgtaccttctttaaataaggatgatgatatcgatcaagaatatgttaatttcgaaagtattaaaaaagaagcggagttcaaaggatttgctggagagagatctatcgatgaacaagccctaaaaacaatttcaaatgactaccagtatagtggtgttgtaaacccacatcaccttaaaaaaatgattggtgatttgccattgaaagaaaaacgtaaagcaagaaaagccattgaatctttcgtggcagaaacaactgaaaaatacggtgtgtaatgattcagccccctcgctagattagtgtagggggcattattatttcattagaaaaggctcatgtgtttggcaatcatcatttggtttcaatacaattttatcatcgtatttgtatagaaataatgtctataggcatttaaaatagtttataatattaacaggataagtattaaatgtatgttgaaggaggtgcgtagctatggataatagaaatatgattaatcgtgtttttagtcaaaagatattacatcaaattgcaatcaaaaataaaagtgatgttgttgatgaggcatatgatttttatatacaagggcctaaaaatatcaatgtaatacagaaaatgaagtctttatataactatcttaaaaagtcttatcgtaacgaatatttttataaaaacacaatgcttaataaactccttttaggactacattctgttaatacaactactgcactttctgagatgcctataggaaatagtattgctgattttatattgttaaatggtaaaggcgttgtctacgagattaaaacagaattagataagttggatagattggataatcaaattaatgattattatgaagtatttaattatgtagtagtcattacaaatgacaaacacttgaataaagttatggctagatacaaagatacaacagtcggaattttagtattaacatctagaaatacactgagtgaagttcaaaaaccaaaagaaaacaatagtctcttaaactcaaaagcgatgtacaactttttacgaaaagaagaaagaaaaagagttattgcacaaaatcatatggatgtgccaacttataatgatttcacagagtatgatgtgttatttgacgtgtttaaagaaataccaatgacgaaactgcataacaatatgatttttgagttgaaaaaaagaggcaacatgaaagaatacaaagatgaatttttagcagctccgactgaaattaagttcttgttatatttcgcaaaaatgacaaagaaagataaaaataaactatatcattttcttaaggatacaaataatcccccgcacttcacatagtggcgggggatttatcatgcgttaaaatgcccaaagtatgggtgtgacccttaaatcatggcaaagcatctaacacttgatatggtgccgagccctaacatagcacaatatagttagtatgacaaagtcatctaacataacacatcagatgttgcccgatttattccagaccatacagtgataaagttgcacaacgcatgacttttatttagcaataactgctacttctgaaataagttgctttgcatagtctgattgcggatgtttgataatatcttctgtgttattaagttcaacgatttcgccatttttcataactgcaactcgatcacatatttcattgataacacccatgtcatgtgtgatgaataaataagtgatgccgaagtctaactgtaattgttttaataactcgatgatatctttttgaattgaaacgtctaaagctgatactgcctcgtcgcaaacaatcactttaggttctacagcaagtgctcttgcgatacttacacgctggcgttgcccaccagataattcgtgtggatagcgatataagaaactttgatctaggccaactttttctaacaacgatacgatagttttaataatgtcgtcattatctttgactttcccatgaatgattagtggtcgtttaatcacatcaatgactttaaatcttggattaatagatgcgaatggatcttggaaaatcatttgtatctcttgtcgtaaagatttcaattcatcatctttaaataaacttaatggtaattcgttataccaaataaagccttctgacacttcctttagaccgacgaccgtcttagctaatgtcgatttccctgaccctgattcaccgacaatgcctaacgtttcgccttttctaatatccaagttaatatcattaactgctcggtataggctgccactcggtgatgtgtaatccacgctcaagcgatcgaattttaataaaatatcattgtttaacggtcttggcggacgcgtttgatgaatatcaggaatcgcatctattaagcgtttcgtataggtatgttgtggcgatttaaaaatactttcaaccgtgccactttcaacgacacttccatctttcattacaatcacatcgtcgcaaaattgatacacagcacctaaatcgtgagtgataaaaataatagacgtttctgtgtactcataaagggacttcattaactgcagtaattgattttgtgtactggcatctaatgccgttgttggttcatctgcgattaaaatttgtggctttaaaatcaatgccattgctatcatgacacgttgacgcataccaccagaaagttcatgcggataagcatcaaattgtcgagttgcatgttttatacctactttttctaaaatgtctattgtcatcgactttgcttcagatttagatacacgtttatgttgaaatagtacttctgtaatttgtttgccaatcgttaatcttggattcaacgaagagagtggatcttgaaaaatcattgaaatatccttgcctcgaatttgttgtaacgctgaagttgataaattagttaacgattgcccattaaaaataatttctcctgttaacgtgtgatccggataatctggtagtagccctaaaatagatttagcggtaatactttttcctgatcctgattcaccaacaatacctaggatatgtttttttcgtaattcgaaagagacgttttttaccgcttgaactgtagtttcatcataattgaattgtacattcagactgttgacttctaataaatttgacatgatgttgtgcctccctattcacaaatgtgtaaatttattctatacttttgtatatcatagtaatctactcaagattattttacaaggagtgattagcataattacttatttagaatcttttaagtcgttgtatcacaaggcattttacaagtttgtattatcggtattaagcttgccattatttttatatgcagtgataaagtttttcttttctgctaagagaaaaaatttttacgctaataattctgaaatttcagaaatcgaacaggcgttacatcaaaaatataaatatttatcgcagcaaaagtcatccacacaaatacataaagaagcattaaaaatattcaagacacaaagttctaatacgaattcaaagaatattgaacaagcacatttttcaacatactttgaaaatgtattatttcataagttcatcattatcaaagtgatattggcgttaccgatgttcatcttattgactatttatttacagccattagttagatatatttttgagcgaattgtcatggctgtgattgtcatcattggtgttattgtcagtgtgtttagcattctgtatttttcaccgcttgatgcggcttatagcatactgggacaaaatgcaacaaaggcacagatacatcaattcaatgtattacatcatcttaacgaaccttattttattcaattgtgggataccatcaagggtgtttttacctttgacttaggtacgacttacaaagggaatgatgttgtgactaaagcagttggcgaaagaattccaattacaataattgtcgcagtattagcgctaattgtggcattaattattgcaataccaattggtattatcagtgcgatgaagcgaaatagttggcttgatatcacgttaatgataattgcattaattggtttgtctattccaagtttctggcaagggttattattcattttagcgttctcattgaaattggatattttgccaccatcttatatgccagaacatccaatatcgttgattttacctgtacttgtcattggaacaagtattgctgcttctatcacgcgtatgacaaggtcttctgtacttgaagtaatgcgcagcgattatgttttaactgcttatgcaaaaggattatcgacgacacaagtggttattaaacatattttgaaaaatgccattattccaattgtaacgctagttggtcttctagtggcagagttactaggcggttcagcagtgacggagcaagtatttaacattaatggtatcggtcgttatatcgtccaaaaacaactaatacctgatatcccagcagtcatgggtggggtcgtatatatatcaattgtaatatctttagcaaacttaattattgatatattttatgctttaatcgatccaaaattacgtagtgaaattaacgaaaggaagtgaggcatatggtaaaacttacaacaaagatagcttccttaaaactattcgcaagttatgctattgcaacttatattttagttatattaacgagtgcattaaatctttttaaaggttatgtggccgatacgttctatattgctgaaacattgctaatcgttttaaccatcattttaattatcatcttaacaacggaacaaacatggaagcatcatgacctatggcgacgtatcgtcgaagtgttgttattgttgatgacattaacagggaacgtatttacattattaatgtttgtaagtattagacgttaccaacgtacatcgcaaatacatagttataatggctgggaatcgtttatacgaaaaactactagacatcgtattgcgattatcgggttacttattttagtctatatgctgacattatcaattgtgtcacaatttacatttgatacgacattggctactaaaaatcagttcaacgcactgttacatggaccgagtctagcctatccgtttggtactgatgatttcggtagagacttatttacacgcgtagttgtcggaacgaagctgacattttcaatttcaattatttcagtagttattgcagttgtttttggtgtgttactaggcactatcgcaggttattttaatcatattgataatttaataatgcgaattttagatgtagtgtttgcaattccatcattattgttagcggtggcaattattgcatcgtttggagcaagtattccaaatttaattattgctttaagtatcggtaatataccatcatttgcacggacaatgcgtgccagtgttttagaaattaaacgcatggaatatgtagatgcagcacgtatcactggtgaaaacacttggaatatcatatggcgttatattttgccgaatgcgattgcgcctatgattgtacgtttttcattaaatataggtgtggttgtattaacaacaagtagtttaagtttcctaggacttggtgttacacctgatgtagctgaatggggcaacattttacgtaccggtagtaactacttggaaacgcacagtaatttagctattgtacctggtatttgtattatgttcgtcgttttagcatttaattttataggtgatgcagtgcgtgatgcgctagatccaagaattcattaaaaaggtagggatagatgtgaagaaaatcattagtatcgcaattatagttttagcgttggtattaagtggttgtggtgtccctacgaaatcagaagtggctcaaaagtcatcgaaagttgaagtgaaaggcgagcgaccaacgatacatttcctaggacaagcaagttatgaaaatgatatgaatatcgtcaaagatcaattggaaaatgcaggatttaacgtgaagatgaatatccaaccagattatggtagctatcgtacacaacgtcaagccggcaattatgatatccaaatcgatgactggatgacagtattcggtgacccgaactatgctatgacggcattatttagttctacaggatcaaatagtttattgaaagataaacatgtagaccagttgttaaataaagcttctactcaaaatgaagcagatgttaaacaaacatataagcaaattgaagatgaagttgtatttgataaagggtatatggcgcctttatatggatcaaaaaagaatttagtatatgacaataaagtgttagataaaaatagtgttggattgccaaattcacgtgcattaatatggcaacaatttgattacaacaatagtagagaacgagatacgcggccacttgtgatgacacaacaagacggtgaaattcctacattggatccaatacgttcaattgcgccgtcagtatattcaattaatatgaatatgtacacaaggttattattattagatgaaaatgaccacttaacaacgaaaggttcgttaagtcgtgattatgctgtgaataaggacaataaagcgttttatttcttattaagagatgatgattattttgcgaaagtggttaatggacaagcacgtaatactggagagcgtgtatcggctgaagatgttaagttttctttagatagagcacgtgataaaaagtctgtgcctaacaataatacttacaatatgcacaaacatataaatgacatcaagatattaaaagatgaggacatcgatcagttgcgtaaagagaaggacaaggacgataattccatctatgataagttgattaaagcgtataacgtcaaatcgttaacgacagatggtcaaaaagtaaataataaagacggtatttatcaaattgttaaaattacgacagatcaatcgatgcctcgagaggtaaattacttaacacactcttcggcaggcattttatctaaaaaatttgttaatcaagtaaatcaagaatatccaaaaggatatggggatagcagtaccattcctgcaaattcagatggaaaaaatgcgctttatgcaagtggcgcatacattatgacacagaaaaatgcatatcaagcaacgtttcaacgtaatccaggattcaacgaaacagaaaaaggtagttatggaccagctaaaattaaaaatattacattgaagtttaatggtgacccgaataatgcattgtcagaacttagaaatcattcaattgatatgttggcagatgtgaatcaaaaacattttgatttaattaagtcggataaaaatttaagcattattcgcaaaaatggacgtaagtcagtctttttaatgctaaatattaaaaaaggtatatttaagacgcatccaaacttgagacaagcagtagttaatgcgatagatcaggatcaatttattaagttttatcgtggcgataaatttaaaattgcatcaccgattacaccacttgtcgatactggtaacgagcaacgtcaagatttagaaaaagtagaaaaagccattaatcaataatgttttaaatatttaacagaaagtaggaggatatagtatggtcattaacttaaatgacaaacagacaaaaacatctaaagaagggttaatttccgtatcacatcctcttgcggctaaaattggtaaggatgtattagatcaaggtggcaacgctatggatgccgtgattgcaattcaactggcattgaatgtggtagaaccatttgcatcaggtattggtggtggcgggtacttgctatattatgagcaaagtactggcagtataactgcgtttgatgcgcgtgagacagcccctgcacatgtagacaaacaattttatctagatgattcaggcgaatataaatcattttttgatatgactacacatggtaaaactgtcgctgtgccagcaattccaaagctgtttgattatattcacaagcgttatgctaaattgtcattggaagatttaattaatcctgcaattgaactagccattgaaggtcattcagctaattgggctactgaaaaatattcgcgccagcaacacgcgcgattgacaaagtatcacgaaacggcacaagtatttacccatgaaaatcaatattggcgtgaaggtgattggattgtacaacccgaattaggtaagacatttcaaatattaagagaacaagggtttaatgcattttataaaggtgacattgcgaaacaattagtcaatgttgtcaaagcatgtggtgggacaatcactttagaggatctagccaattatgatattcagattaaagcgccaatcagtgcgacatttaaagactatgacatttattcaatgggaccatctagttctggcggtatcacggtaattcaaatattgaagttattagaacatgtcgatttacaatctatgggtccaagatctgttgattacttgcatcatttgatacaggcgatgcatttagcatatagtgatcgcgcgcaatacttggcggatgataattttcatgaggtgcctgtacagtcattaattgatgacgattatttaaaagcacgcagtaagctcattgatagcaataaagcaaatattgatatagagcatggtgttgtgtctgattgcattagtcatacagatgttgaagaaaatcataccgaaacaactcatttttgtgtgattgataaggaaggtaatattgcttcatttacgacatcaatcggtatgatttacggatcgggtatcacgatttcaggctacggcgtgttattgaataccacaatggatggttttgatgttgtgacgggtgggatcaatgaaattgcaccttataaacgaccactaagtaacatggctccaacgattgtgatgcatcacgggaagccaatattaacagtaggtgcacctggtgctataagtatcattgctagtgttgcgcaaacattaatcaatgtattagtgtttggcatggatattcagcaggctatagatgaacctagaatttatagtagccatcctaatcgcattgaatgggagcctcaattttcacaatctacaattttagcattgattgcacgtggacatgcaatggaacataaaccagatgcctatattggagatgtacatgggctacatgttgacttgaatacacgtgacgcatcgggaggtgctgatgatacgagggaaggtacagtgatgggtggtgaggtattatcaattagaaaacaaccattaccatatcgtcaaatgtatggtagtaatgtatatcgtgtatatttcaatgatgtgcagttacctttattggcagatcaagtgcgatggatgcatgacaaatattgggttgatgaaagtgtcgttagaatcatcttctctgaagttagtgcacatattgaagatttaagaagttatgaaaacgcaggagaaaattatatagatattacctggttagcacgaaagaaaggttatcaagtaacattgaaggatgacggtttatacttaactgatgatacatatacttcagtgaaacggaacacaaatgcatactatagatatgatcgagatagtatcacaagatagtttatacgcttgatatgaagtttgtagtggataaggacttttgttgaaagaaaggattcgatttcgaactttagcgtgacgcttgagtgtagtaatgttggaaatgctatacgaaacgctagtcacctttgtaaatatacaacacctcacatattcgtttttgatgtacatcacaatagttagtctaaaatctaacgtgatgtggtttggtacagttgaacgagttatgtgaggtgtttttataatgtgggattttaatagatgatttggatgtttctataattacagcataagtattaatgttcgctactaagtttaaccagaagtttttatgtgtcttcatactttcatatctactctcaaaatatatcatcaacactatcatatgttttaaaaatatttacatcataactaaagtgaatgtcaaaatttaaatttgtaaaaacaatagatgtatataaaaagttgaaaaggattgtaagaaaatcaaaaaaacactgtatgacgtttgattagtcacacagtgtagataacaattaaaatgttgttgccaatttttcagcattattaatactagttgctttaatttcttcagttttatgcggttcggcattgtgtccttcaataatgattgtttcatatgatggcacacctaagaatgtcataattgttcttaaataacggtcacccatttcaaaatcagcagcaggtccttcagtataatatccaccacgtgattgaatgtgtaatacttttttgtcagttagtaaaccttgtggtccttcagcagaatatttaaaagttttacctgcaattgaaatagcatcaatatatgctttaactacaggtgggaaagaaaggttccacataggcgttacaagcacatatttatctgcacttaaaaattcttctaaaatgtcactcaatcttgaaactttcatttgttcatcatcagttaacgtttcgccattactcattttcccccaaccagttaatacatctttgtcaataactggaatataagtttcaaataaatcaatatgtttcacttcatcttcaggatgttgttgttgatatgtttcgataaatgctttaccagccgccatagaatttgataccagttcattaaaagggtgtgctgtaatatataatacttttgccatttgaaaattctcctctgtttctgttattttcttaagtataattattatactaggtataaaatttaatatcaatcaaaatattcaaattaccatcattttcttcatctatattttgcagtactactaaagtatgagtgcatttaattatgaaatagttgatttagaatatatacttaatacccaaaatatatgaaggatggatgccactatgacaaagcgaccaaaacgtattttggcaacaattatcatttttctttcactattatttacgattatttatatagatgacatacaaaaatggtttaaccaatataccgataaattgacacaaaatcataaaggacaaggacactcaaaattggaagacttttttagagggagtcggattactgagacttttggtaaatatcaacattcaccatttgatggtaagcattatggtattgattttgcattgccaaaaggtacaccaattaaagcgccgacgaatggtaaagtaacacgtatctttaataatgaattaggcggcaaggtattacagattgccgaagataatggagaatatcaccagtggtatctacacttagacaaatataatgtcaaagtaggtgatcgagtcaaagcaggtgatattattgcatattcaggcaatacaggtaaacaaacgacaggcgcacatttacattttcaaagaatgaagggtggcgtaggtaatgcatatgcagaagatcctaaaccgtttatcgatcagttacctgatggggaacgtagcctatatgatttgtagttatagaagagtgcccgcagtctaaaaaatcaagcaatcattgtgtgagtataatacttacataatggttgcttttttcaatgaaaatcgaaatgctaagtcatacttgtttgatttagatattatttaaaatgtaagacaaggttgttagcattggcagtgaaatttcgcacgtaaaaaatcattattgacacactaaaaatagttgtgtgctatatcaattttctgtataaaagtttaattctgacagtaatgtaaacgtttacaatttatgattgacattaataataagtgactatatgatttatgtaagtatttgtgcaaacgttttcacaaagtgtattgcacaatcaaactgtaaacaaagtatgggaggcataacatggcagaactaaagttagagcatattaaaaagacgtatgataacaacaatactgtagtgaaagattttaatctacatattactgacaaagaattcattgtatttgttggaccatcgggatgtggtaaatcaacaacattacgaatggttgctggactagagtctatcacatctggagatttttatattgatggggaacgcatgaacgatgttgaaccaaagaatagagatattgcgatggtatttcaaaactatgcattatatccacatatgactgtttttgaaaatatggcatttgggctaaagctacgtaaagtgaataaaaaagagattgaacaaaaagttaatgaagcagctgaaatattaggattaactgagtatcttggtcgtaaaccaaaagcgttatctggtggacagcgtcaacgtgttgctttgggcagagctattgttagggatgcgaaagtctttttaatggatgaaccattatcgaatcttgatgcgaagcttcgagtacaaatgcgcacagaaatattgaaattacataagcgacttaatactacgacaatttatgttacgcatgatcaaactgaagcattgacgatggctagtcgaattgttgttttgaaagatggcgacattatgcaagtcggcacacctagagaaatatatgatgcccctaattgcatttttgtggcgcaatttatcggctcaccagcaatgaatatgttgaatgccacagttgaaatggatggattgaaggtaggaacacaccattttaaattacataataaaaaatttgaaaagttaaaagctgctggctacttagataaggaaattattttaggtattcgagctgaagacattcatgaagaaccaatatttattcaaacctctccagagacacaatttgaatctgaagtagttgtatccgaactgttaggttcagaaattatggtacatagcacattccaaggaatggaattgatttctaaattagattcaagaacacaagtgatggcgaacgacaagattacactagcatttgatatgaataagtgtcacttttttgatgaaaaaacaggaaatcgtatcgtctaagggggagtattcatgtctaaaattttaaaatatatcacgttagccgtggtaatgttattaatcgtaactgcatgtggccctaatcgttcgaaagaagatattgataaagcattgaataaagataattctaaagacaagcctaaccaacttacgatgtgggtggatggcgacaagcaaatggcgttttataaaaaaattacggatcaatatactaaaaaaactggcataaaagtaaagcttgtaaatattggtcaaaatgatcaactagaaaatatttctctagacgctcctgctggaaaaggtccagatatctttttcttagcacatgataatactggaagtgcctatctacaaggcttagctgctgaaatcaaattatcaaaagatgagttgaaaggcttcaataagcaagcacttaaagcgatgaattatgacaataagcaattagcattgccagctatcgttgaaacaaccgcacttttttataataaaaaattagtgaaaaatgcaccgcaaacgttagaagaagttgaagctaatgctgccaaactaactgatagtaaaaagaaacaatacggtatgctatttgatgctaaaaatttctattttaattatccgtttttattcggcaatgatgattatattttcaagaaaaatggcagtgaatatgatattcatcagctaggactaaattcaaaacatgtcgtcaagaatgctgaacgattacaaaaatggtacgacaaagggtatcttcctaaggcagcaacacatgatgtcatgattggtctttttaaagaaggaaaagtaggacaatttgtcactggaccatggaacattaatgaatatcaagaaacgtttggtaaagatttaggagtaacaacattgcctacagatggtggcaaacctatgaaaccatttctcggtgtacgtggttggtatttatctgaatatagtaaacataagtattgggctaaagatttaatgttgtatatcactagtaaagatacattacaaaaatatacagatgaaatgagcgaaattactggacgtgttgacgtaaaatcatctaatccaaatttaaaagtgtttgaaaagcaagcacgtcatgctgaaccgatgcctaatattcctgaaatgcgacaagtttgggaaccgatgggcaatgcaagcatatttatctcaaatggtaagaatcctaaacaagcgttagatgaggcgacgaatgatataacgcaaaatattaagattcttcatccgtcacaaaatgataagaaaggagattagttatgacgaaacgtaaccctaaattagcggcattattatctgttatacctggtttgggacagttttataataaaagacccattaaagggacgatattttttatctttttcatcagttttatttctgtattttatagctttttaaatattggtttttggggattgttcacattagggacagtacctaagttagacgattctcgtgtcttacttgcacaaggtattatttctatcttactcgttgcttttgcaatcatgctatatgtcattaatattttagatgcatatcgtaatgctgaacgatttaatcgcaatgaggaaataaaggatccgaaggcacgtatggttgcaacatgggacaagacgttcccatacttactaatctcaccaggtacattcttattgatatttgtagttgtatttccattaatatttatgtttggagtagcatttacaaactacaatttatacaacgcgcctccgagacacacattagaatgggttggtttagataactttaaaacgttattcacaattggcgtttggcgtaaaacatttttcagtgttattacttggacattagtatggacgcttgttgcaacgacacttcaaattgcattagggctgtttttggcaattattgtaaatcaccctgtcgtcaaaggtaagaaatttatccgcactgtgttaatcctaccttgggctgtaccatcatttgtgacaattttaatatttgtagcgttatttaatgatgaatttggtgcgataaataatgatatattgcaacctttattaggtgttgcaccagcatggttaagtgatccattttggtcaaaagtggcattaattggtattcaagtatggcttggtttcccattcgtctttgcactgttcactggtgtactgcaaagtatttcatcagattggtacgaagcagcagatatggatggtgcgtctagttggcaaaagttcagaaacatcacattcccgcatgtcatttacgccacagcgccattgttaattatgcaatatgcaggtaatttcaataattttaatcttatttatctatttaataaaggtggtccaccagtgtcagggcagaatgctggtagtacagatatcttgatatcttgggtgtataatctgacatttgagtttaacaactttaacatgggtgcagttgtgtcattaattattggatttattgttgctattgtcgcatttattcaattcagacgtacaagtacgtttaaagatgagggaggtttataagatgacaaagaagaaaaacatattaaaagcaatcggtatttacagttttatagcgatgatgtttgtcatcattttatatccactactgtggacatttggcatttcccttaatccaggtacgaacttgtatggtgccaaaatgataccagacaatgcaacatttaaaaattatgcattcttactattcgatgacagtagtcaatacctgacttggtataaaaatacgcttatcgtagcatctgcaaatgcactgtttagtgtgatatttgtcacgttaacagcatatgctttttctagatatcgctttgttggtcgtaaatacgggctgattacatttttgattttacaaatgttccctgtattaatggcaatggtcgcaatctatattttgctaaatacaattggattattagattctttatttggactaacacttgtatatattggtgggtctataccgatgaatgcctttttagtgaaaggttacttcgatacgattccaaaagaacttgatgaatctgccaaaattgatggtgctggccatatgcgtattttcttacaaattatgcttccattagctaagccaattttagcagttgttgctttgttcaattttatggggccatttatggactttatattacctaaaatactattaagaagtcctgaaaaattcacattagcagttggattgttcaactttattaatgataagtatgcaaataatttcacagtgtttgcagcaggggcaattatgattgcagtacctatagcaatcgtattcttgttcttgcaacgctacttagtatcaggtttaacaacaggtgcgacaaaaggttagtttgaaattgggagcggggcagaaatgataaagaaccactaatgaatttattgtgtagtggctcttacaaattagccacagctaatatgtatctaaaaatagcctagaacgttgattgatgtttaaggctcgacatacgtactaatgacgataaagatttaaaggaggacgttatgatgacgattaaagttggaatcattgggtgtggtggtattgcgaatggcaagcacatgccaagtttacaaaaagttgaaaatgttgaaatgatcgcattttgtgacgtagacatttcgaaagcagcgtgtgcggcagaagcatacggtactgacaatgcaaaggtttatgatgattacaaagcattgttaaaagatgacacgattgatgttatccatgtttgtacgccaaatgactcgcattgtgaaattactgtagcagggttgcatgccggtaaacatgtgatgtgtgaaaaaccaatggctaaaacgacagcagaagctcaaaaaatgatagatacagctaaatcaacaggtaaaaaattaacaataggttatcaaaatcgcttcagaccagatagtcaatttttatataaatcagcgcaacgtggcgacttaggtgacatttatttcggaaaggcacatgctattcgtcgtcgagcagtaccaacatggggtgtatttctagacgaagaagctcaaggtggaggaccattaatcgatatcggtacacacgctttagatttaacgttatggatgatggataattatgaaccagaatcagtgatgggttcaacattccataaattaaataaacagcatgatgcggcaaacgcttggggttcatggaatccagatgaatttacagttgaagattctgcgtttggctttattaaaatgaagaacggagcgacgatcattttagaatccgcttgggcgattaattctttagaagtggatgaggcaaaatgttcattatcaggaacgaaagcaggtgctgatatgaaggatggtctacgtattcatggtgaagatatgggcacactttataccaaacacgttgaattggaaaacaaaggcgtcgacttttatgaaggtaatgaagtggatgaagctgaagaagaagcaaaagcttggattgatgcagttgtaaatgatactgaaccagttgtgaaaccggaacaagcaatggtagttacaaaaattcttgaagcgatttatcagtctgcaaaatcaggcaaagcaatttactttgaataacatcatacggtaaggaggcacatcatgacaaaattaaaagttggtgtgataggtgttggtggtattgcacaagaccgtcatattccagcattgctgaaactcaaagacacagtctcattagttgcagtacaagatattaatacagtgcagatgattgatgttgcgaagcgctttaatatacctcatgcagttgagacacctagcgagctgtttaaacttgttgatgcggtggtcatttgtacacctaataaattccatgctgatctttctatagaggcattgaaccatggtgtccatgtattgtgtgaaaagccaatggcgatgacgacggaagagtgtgaccgcatgattgaagcggctaataaaaattgcaaattattaactgtcgcatatcattatcgtcacacagatgtggcaattactgctaaaaaagcaattgaatcaggtgtggttggaaaacctttagtagcacgtgtacaagcgatgcgtaggcgtaaagtgcctgggtggggtgtttttaccaataaggcattgcaaggtggcggtagtttaatcgattatggttgccacttgttagacttatctttgtggctactaggtaaagatatggtgccgcatgaagtgctaggaaaaacatataatcaattgagcaaacaaccgaatcaaattaatgattggggaacatttgatcacactaaatttgatgtcgatgatcatgttactagttatatgacatttgccaatcgagcaagcatgcagtttgaatgttcgtggtctgcaaatataaaggaagataaggtacacgttagtttatcaggcgaagatggcggtatcaatttatttccatttgaaatatatgagccccgctttggaactatttttgaaagcaaagctaatgttgagcataacgaagacattgctggtgagagacaggcgcgtaactttgtcaatgcgtgtttagggatagaagagattgtggtaaaaccggaagaagcacgcaatgtaaatgcccttatagaagcgatttatcgtagcgatcttgataacaagagcatacaactttaatgattattatatataatacaaaattctcaatataaaaagaaggagtgcttttcaatgaaaataggtgtattttcagtattattttacgataaaaatttcgaagatatgttagattatgtcgcagaatctggattggatatgattgaagttggaacaggtggtaacccaggagataaattttgtaagttagatgagttgttagaaaatgaagacaagcgacaagcatttatgaagtcaatcacagacagaggcttacaaataagtggtttcagttgtcataacaatccaatttctccagatccgacagaagcgaaagaagcggatgaaacgttacgtaaaacaatccgtttagcaaatctattagacgtgccagttgttaatacattttctggcattgcaggatcagatgataccgctaaaaagcctaattggcctgttacaccttggccaacagcctactctgaaatttatgattatcagtggaatgaaaagttgataccatattggcaagatttagctgagtttgcaaaagagcaagatgtaaaaattgccatagagttgcatgcaggatttttagttcatacaccatatacgatgttgaagttacgtgaggctacaaatgaatacatcggtgctaacttagatcctagtcatttatggtggcaaggtatcgacccaattgctgcgattcgcatattaggccaagcaaatgcaattcatcacttccatgctaaagatacgtatattaatcaagaaaatgtaaatatgtatggtctaactgatatgcaaccatatggtaacgttgcaacaagagcatggacgttccgtacagttggttatggacatagtccatatgtatgggcagatatcataagccaacttattattaatggatatgagtatgtattaagtattgaacatgaagatcctattatgtcagtagaagaaggtttccaaaaagcttgtcaaactttgaaatctgttaatatttacgacaagccagcagacatgtggtgggcataatacgaattcgaggttagtctgaagtttgtctgaagtaagactggtggcagtgttgaataaatgcatatatcgccaagccattgccaaaaatttcacaccttaaatcaagttcattgtttgtaaagaaggtgtactttatataagtatatagcgatggtcatacccattcacaataacaatcctcactattgaaaagagtaaataagcttttcaatagtgaggtatatgataataaaaaagcctgttgtcacaatggtcatagacacgacatactttaaaggtttctgaatataatatttcagaacgcactttaaagatggacgtcgatggcgactaatgtgatgacaggctttcatttttaaatattcattaatttctcttcttgtttaatacgtacatataagaaatacgcatacggtactaataaaatagttgtatatgttgcgtgtgttaataataatacaccgattaattcaggaatgatgtttaagaagtaatttgggtgttttgtaattttatataatccagatttaataataggatggttaggtaaaatgaataattttaatgtccaaataccacctaaagttttaataaccataaataacatgatataagcaaagattaatataactaagccaataccatttgcaaagctaaatgtatctttattaataaatgcctctacaccagccaatacataaattaaaacgtgtgttattgctaaaaacttcgaatttttaacgccatattcaactgcaccgtctgcttttaattgttttgagtgattaatagatatctttaagctgacaagtctgatacagaaaaagataagtaatatagatagaatcatgatgtcctccgtcattatgtcatatgtataagcgttgattttgacaacataaagtattttatagataaaacttgtcaaatactattaactatttattaattttagtacataaatatgtttctaagtatgtgtttatgttcagtattttggataatttaataattttaaggatattaagcgcttacaccgacgtgatatatttgacttaacgaaaatgattgaggtgacagagatgaacttttttgatatccataagattccgaacaaaggcattccattatcggtacaacgtaaattatggcttagaaacttcatgcaagctttcttcgtagtgttctttgtttatatggctatgtatttaattcgaaacaactttaaggcggcacaaccgtttttaaaagaggaaattggattatctacattagaacttggttatatcggattagcatttagtatcacgtacggtttagggaaaacattacttggatattttgtcgatggacgtaacacaaaacgtattatctcattcttacttatcttatctgcgattacagttttaattatgggatttgttttaagttactttggttcagtaatgggattattaattgtactttggggacttaacggggtgttccaatcagttggtggacctgcaagttattcaacgatttcaagatgggcgccaagaacgaaacgtggccgatacttagggttttggaatacatcacataatatcggtggtgccattgcaggtggtgttgcactttggggtgctaatgtattcttccatggaaatgttatagggatgttcattttcccatcggtgattgcattacttattggtatcgcaacattatttatcggaaaagatgatccagaagaattaggatggaatcgtgctgaagaaatttgggaagagccggttgataaagaaaatattgattctcaaggtatgacaaaatgggagatctttaaaaaatatatcctgggaaatcctgttatatggattctatgtgtttcaaacgtctttgtatacattgtacgaatcggtattgataactgggcaccgttatatgtgtcagagcatttacactttagtaaaggcgatgcagttaatacgatattctactttgaaattggtgctttagttgcaagtttattatggggctacgtatcagacttattaaaaggtcgtcgtgcaattgtagctattggctgtatgtttatgattacatttgttgtcttattctacacaaatgctacaagtgtaatgatggttaacatttcattgtttgcattaggtgcgttaatctttggtccgcaattattaattggtgtatcattgactggttttgttcctaaaaatgccatcagtgtagcaaacggaatgacaggttcattcgcgtatctattcggtgactcaatggcaaaagttggtttggcggctattgctgatccaacacgtaacggtttaaacatctttggatatacattaagtggatggacagatgttttcatcgtcttctatgttgcattattcctaggcatgattctattaggaatcgttgctttctatgaagaaaagaaaattagaagtttaaaaatctaatatcaatcggattaaaagtatcgccaatttattgcagtatagttggcaatcctgccccgacggcatgtgcgtgaagagatgaaagatactgcttctacccttgcaaatatatcatctctatgtctcggggcagatcataattccctgttatgaagtatccttatttgcccgacttagggtgactcaatgaatttactccctacaataaagacatatagcggtgtcaatattgtagggagtattgttttatatttagactctctaaaaagcggattgaaagaaaagtgaaaacttctctatcagtccgctttttcatagaacaaaatggatgcgccataatcattagttatttgctaatctattttgcttgcttacaataatcacttggcgacatttgtaaatattttttaaaatgatagctaaacattttatactctgaaaagcctactttgtctgcaatttcatagtgcttataatgtcgatctaacaattgtagagattgtaaaatacgatagcgatttaaataatcgacaattgtaataccaacatgatctttaaatgttcgcatcgcatacgattcactaacatcgatatgttgaattaaatctgaaacagtcactttcgtttgataagattgcttaatttgatcaacaatctgatttacataataatcatcgtattctacttttaataatggttggaaggcatcatgacaaggtgctaagctacggccgttctgtgattgttgctctaataaggtacggacaagtcttcctaaaataacttctaattgtgcatggtctactggttttaataaataatcaagaacatgatgttgaatgccggctttcatatattcaaagtcatcgtaactcgataatatgatgacattacaatctagatgcgcaatatcattgagtaaatcgacgccatttttacgtggcatacgaatatcagtaattactaattctggctgatgttgttgaattagtgataatgcttcaacaccatctttagcagtgtatattgtattgaaatgatagtctccccaaggaatgatttgctttaaaccttctcgaataattcgctcatcatcacaaataactaccttaaacatctacattcccccttgaaagtggtattttataacaaattaacgtaccttgattacgctttgaaaaaatatggagtcgtgcatgtgaaccatattgaatcattgctttattgtgtaaatgatttaatcccaaatgcttagtatcaaatacatcattattaagagattggcgtacatattgcaggcgagatgacgacatcccaataccattgtcgcaaactaaaacatgtaaattctgacgtgccaatgtcaggcgtatagtaatgtccaatgactcagtatctctaccatgtttaatagcattttctatgagtggctgaagcatcattttaccaattgtctggtgacgcgcttcttcagaactttcgatatggagcttaatcatgtcatcaaaacggatgttttgtatcgcaacatactgttcaatgtagttcaactcttcgtttaattccactgtatgtgagtttgtacgtaatgagtaacgtaacatttgcgataattgttggaccacagtttgtgctaatttcggagataacgtaattaaatattgtattgtttgcatcgtattgaataggaaatgaggttggaattggcgttctatttcctttaactgaatatcacgcaagcgacgttctgtatgctcgatagaatggatcagttgctcatttgattcaaataaatcgtaaatataattattaatttcttctagttcactgttgttttttaaaggcgtatatgtacctagatgacgatttttggcatagtaaattttttgaataatcgtttcgatatcttttgtttgtcgtttagccatattatctgcactaatgaaaccaaatattactagtaaaacaagaactacggccataacaattaacaacgtgataccatcttcaatgttttcatgtatatctttataaataatgagacgatggtcagcatggtttaattttacagattcattcataaatccgaattgttgcggtctatacttttcacctatagtaaaacggtcatcgttggcgtataaaatattgtcatattgatcaacgataagtgcgaattgtcggctatctttcttaatttcacttaaacgtggggtgttagctatataaattttaagcatatatgtactatttttgaatttaagctgatgcgttgaaaataaatacatatttttagtgtttaaatgttcataattattggttataaactgatttggtccagataattcataataaagtgttgcgggctgttggtgtattaattttaataattcacgttttgtagcggtaacatcatgatgatttgttaaatcgagctcttgaaacgaattattatgctgtgtaataaacgtctgaatttgcttttcagtatgatgtaaagatgactgactttcatcaacatgttgatgaatcgtacgatgctcaatccaaatatagatggcatagaagcttactagtccaataataatcactaaaaatactggaaaaatagtagacgcaaataacgatcgtctcaattgatgtctataaggtttgtatgccgtcattgaatcatctccaaaaatttatgatgcagaatgtccggtaatttagatttcggtattaaaggtatgttcttaagattttcgatagactgatcgctttgttcactaacatcttttcgaattgacttggcatcgaactctgcaactaatcgttgttgtactgagcggcttgttaaatattgcactaactttttacgcttaggatgagggtgtgcatttttaactaaagcaataccatcaacatttaacattgttccttcaattggataaacgattgatacaggataacctttgtttttccatgtgcgtgcatcttgttcgtagcttagacctgcataatatttaccttttgcaacatcttcaatgactttagacgtctttgacagttgcatcgcgtggtcttggaattgatgcacatcacttactcgatgatgcatgctataaatagcgcgcatatgttgatagcctgtcgttgttgtatttggatttgagtacgcaattttacctttaagtataggttgtaataaatcttgataaccttgaatcttaatatctccttgtaaatctgaattaactactataactgttggcattaatagaaagctagtaacatatttattgttcgagcgataatcctctaattgctgtgttacagatgtatcttgatagggaacaaaatcttctggatgatcaattgtttctgacaacacaccacccataaagacatcaccacgctccgaaagatcttcattatgcaagtttgaaagcagtacttgagtagatccgtgtttaatttcaattttgacatgctcttgtttttcaaaatcatttaaaattggacgaatcaagtttgattgatacggagaataaactgttaatacatttttatctgattcagagtgacgcgtattagtgcatgctgataaaaaaatgagaaataatagcaagatataaatttttgatttcatgatatcccatcaattctatgtatattttaatacaataattttagcaataaatgacgcataagtaatgttaaatatttagaaatgtttatagatgacttgttaagacgttgcaaatgttgtgatagcacataatttttgtttgtcaagacgacttaccgaagctgtaaagtcaaactgttatattttatttgaagctgttatataaaaattggcaagatattgaacggttcaaaagtaaatttttacgtcaataaaagtatttaatcctgtctcttcatatataaaagtaaatctttctaagtattgatttaacgcttattaacaatcattttttataaacaaatatatactcctaaattaacttttaaagtaatgaaaatagtgaacattataactgttgtgtaacagaatgcaattagcatattactgttacacaaattagtacagtttctatgttttgacatacatttgatgaaaattgtacataatttatgtgaaaaaaatcacaacaaacatgctacaatgactatgaaaacgttaacatagcatttcaaattcacaacattatacagatggaggcgtttagtatgttagaaacaaataaaaatcatgcaacagcttggcaaggatttaaaaatggaagatggaacagacacgtagatgtaagagagtttatccaattaaactacactctttatgaaggtaatgattcatttttagcaggaccaacagaagcaacttctaaactttgggaacaagtaatgcagttatcgaaagaagaacgtgaacgtggcggcatgtgggatatggacacgaaagtagcttcaacaatcacatctcatgatgctggttatttagacaaagatttagaaacaattgtaggtgtacaaactgaaaagccattcaaacgttcaatgcaaccattcggtggtattcgtatggcgaaagcagcttgtgaagcttacggttacgaattagacgaagaaactgaaaaaatctttacagattatcgtaaaacacataaccaaggtgtattcgatgcatattctagagaaatgttgaactgccgtaaagcaggtgtaatcactggtttacctgatgcatacgggcgtggacgtattatcggtgactatcgtcgtgtagctttatatggtgtagatttcttaatggaagaaaaaatgcacgacttcaacacgatgtctacagaaatgtcagaagatgtaattcgtttacgtgaagaattatcagaacaatatcgtgcattaaaagaattaaaagaacttggacaaaaatatggtttcgatttaagccgtccagcagaaaacttcaaagaagcagttcaatggttatacttagcataccttgctgcaattaaagaacaaaacggtgcagcaatgagtttaggtcgtacatcaacattcttagatatctatgctgaacgtgaccttaaagcaggtgttattactgaaagcgaagttcaagaaattattgaccacttcatcatgaaattacgtattgttaaatttgctcgtacacctgattacaatgaattattctctggagacccaacttgggtaactgaatctatcggtggtgtaggtattgacggacgtccacttgttacgaaaaactcattccgtttcttacactcattagataacttaggtccagcaccagaaccaaacttaacagtattatggtcagtacgtttaccagacaacttcaaaacatactgtgcaaaaatgagtattaaaacaagttctatccaatatgaaaatgatgacattatgcgtgaaagctatggcgatgactatggtatcgcatgttgtgtatcagcgatgacaattggtaaacaaatgcaattcttcggtgcacgtgcgaacttagctaaaacattactttacgctatcaatggtggtaaagatgaaaaatctggtgcacaagttggtccaaacttcgaaggtattaacagcgaagtattagaatatgacgaagtattcaagaaatttgatcaaatgatggattggctagcaggtgtttacattaactcattaaatgttattcactacatgcacgataaatacagctatgaacgtattgaaatggcattacatgatacagaaattgtacgtacaatggcaacaggtatcgctggtttatcagtagcagctgactcattatctgcaattaaatatgcacaagttaaaccaattcgtaacgaagaaggtcttgtagtagactttgaaatcgaaggcgacttccctaaatacggtaacaatgacgaccgtgtagatgatatcgcagttgatttagtagaacgctttatgactaaattacgtagtcataaaacatatcgtgattcagaacatacaatgagtgtattaacaattacttcaaacgttgtatacggtaagaaaactggtaacacaccagacggacgtaaagctggcgaaccatttgcaccaggtgcaaacccaatgcatggccgtgaccaaaaaggtgcattatcttcattaagttctgtagctaagattccttacgattgctgtaaagatggtatttcaaatacattcagtatcgtaccaaaatcattaggtaaagaaccagaagatcaaaaccgtaacttaactagtatgttagatggttacgcaatgcaatgtggtcaccacttaaatattaacgtatttaaccgtgaaacattaatagatgcaatggaacatccagaagaatatccacagttaacaatccgtgtatctggttacgctgttaacttcattaaattaacacgtgaacaacaattagatgtaatttctcgtacattccatgaaagtatgtaacaaaatttaaggtgggagcactatgcttaagggacacttacattctgtcgaaagtttaggtactgtcgatggaccgggattaagatatatattattcacacaaggatgcttacttagatgcttgtattgccacaatccagatacttggaaaattagtgagccatcaagagaagtcacagttgatgaaatggtgaatgaaatattaccatacaaaccatactttgatgcatcgggtggcggtgtaacagtcagtggtggcgaaccattgttacaaatgccattcttagaaaaattatttgcagaattaaaagaaaatggtgtgcacacttgcttagacacatcggctggatgtgctaatgatacaaaagcatttcaaaggcattttgaagaattacaaaaacatacagacttgatattattagatataaaacatattgataatgacaaacatattagattgacaggaaagcctaatacacacatccttaacttcgcgcgcaaactgtcagatatgaaacaacctgtatggattcgccatgtccttgtgcctggttattctgatgataaagacgatttaattaaactaggggaatttattaattctcttgataacgtcgaaaagtttgaaattctgccatatcatcagttaggtgttcataagtggaaaacattgggcattgcatatgaattagaagatgtcgaagcgcccgatgatgaagctgttaaagcagcctaccgttatgttaacttcaaagggaaaattcccgttgaattataaatacaattcagaccgaaaagaaagcatatgcaacttcaagagtgaaggggcatatgcttctttttcaattgagtattgattattaacaagacgtagtaaatatatgagacaagtccaacaatggttgaaggaagacgcatttgtaagtagctatgctgataaagaatgtgatgccttgttaaagatggggttccaatatcatcgaatgggttattatttgctacttgcatacgaatatgagtcttttcaaatttttattgaccctgagtaatgaaaaatattaagatgaaacttaatattaaagcaatgcggagcgtgattatgaagagaatttgtcactttgcttgatatatgagaattatttaaccttataaatgagaaaaaagcaacgcactttaaataagatacgttgctttttcgattgatgaacacctataattaaactattcatctattatttataattttttgtatatacaatatttctagtttgttaaagagaattaagaaaataaatctcgaaaataatagagggaaaatcagtttttgatatcaaaattatacatgtcaacgataatacaaaatataatacaaaatataagatgttatcagtatttattatgcatttagaatattaaaattccttcattacactcttggcggtttcacttatcaacttatcatttggcttatcacttttattgtctttattcgtaaaaatgactaaaacaataggttcagattggcccttaggataaacaaaagcaacatcatttctagaagcatatgttattgcttgaccacttttatcagcaaccttatagtcttttggaacaccgtctttaattaaagtatctccgcttttattatttaacattaaatcaagtaagaattttttgttttctttgcttaattttccatttgcgataagtttatttaaagtcttaccgaaagcagcaggtgttgaagtatcttttttgctctttggtgaatagtaatttaattctatctcatatctaactggatttgttactttatctcctagttcttttagacgttgtttaacttttttgattccaccgatttcttttataattttattgtttgctgtattatcactatatgtcattgaagcctcaataagtgcttttaaagtgatatcttttcctacatatttttctaaaataggagaataagcaactatatcatctttgttaatatgtacttttttatttaacttattataaggtacttgttctaacaaaatagcactatttatcgcttttgaagttgaagcataggcaaatctcttatctgaattaaattttacttccttaccacttttagtatctaaagcataaacaccaatatgagcattatattttttttctaaatcatttaactctttggcatgtgaactgtttgaattacatgcacttaaaactaaagcaattacaattaaaaatattaactttttcaaaataaaccctccgatattacagttgtaatttttataaatcaataatattacaattgtaatatcggtgtcaatagtttattataaatatttgaaagaaggtgttgaaatggctaagttattaataatgagcatagtaagcttttgttttatatttctattgttattattttttaggtacatattaaaacgctattttaattatatgttaaattataaagtttggtatctaactcttcttgcaggattaattcctttcattcctattaaattctctctttttaaatttaataatgtgaataatcaagcgcccacagttgaaagtaagtcacacgacttgaaccataacataaataccaccaaacctattcaagagttcgcaacagatatccataagtttaattgggattcaattgataatatctgcacagttatttggatagttttagttattattttaagttttaaatttttgaaagccttattatatcttaaatatttaaagaaacagtcactttatctaaacgaaaatgaaaaaaataaaatagatacgatacttttcaaccatcaatataaaaaaaatattgtgattcgaaaagcagagactattcaatctccaataactttttggtatgggaaatatattattttgattcctagttcatattttaaaagtgtaattgacaaaagactaaaatatataatattgcatgaatatgctcatgctaaaaatagagatactttacatttaattatctttaatatcttctctattattatgagttacaatccattagtacatattgtaaaaagaaagataattcatgacaatgaagtagaagccgatagatttgtccttaataatattaacaaaaatgaatttaaaacttatgcggaatctattatggactccgtattaaatgttccattttttaataaaaatatattaagccattcatttaatggtaaaaagtcattactcaaaagaagattaattaatataaaagaagccaatctgaaaaaacagtccaaattaattctaatttttatttgtatttttacttttttgctcatggtaattcaaagccagtttttgatggggcaatccataactgattataattataaaaagcccttacacaacgattaccaaattttagataaaagtaaaatttttggttcaaatagtggatctttcgtcatgtacagcatgaagaaagacaaatactatatttataacgaaaaagaaagtagaaaaaggtattctcctaattcaacttataaaatttatttagctatgtttggacttgaccgacatattataaatgatgaaaattcacgtatgtcatggaatcataagcattacccttttgatgcttggaataaggaacaagatttaaatacagcaatgcaaaattcagttaattggtacttcgaacgtattagcgatcaaataccaaagaactatactgcgactcaactcaagcaattaaattatggtaataaaaatttgggaagttataaaagctattggatggaagatagtttgaaaatatctaatcttgaacaagtaatagtttttaaaaatatgatggaacaaaataaccattttagtaaaaaagcaaagaatcaattatcttcttcattattgattaagaaaaatgaaaagtatgaactgtatgggaaaacaggtacaggtatagtaaacgggaagtataataatgggtggtttgtaggttacgtaattacaaatcatgataagtattattttgctacacatttatcagatggaaagccatctgggaaaaatgctgaattaatcagtgaaaaaatattaaaagaaatgggtgttttaaatggccaataagcaagttgaaatatctatggctgaatgggatgttatgaatataatatggggtaaaaaatcagtatcagctaatgaaattgtagttgaaattcaaaaatataaagaagttagcgataaaacgattagaacattaatcacaagactatataaaaaagagattataaaacgatacaaatcagagaatatttatttttactcatcaaatattaaagaagacgatattaaaatgaaaactgctaaaacctttcttaataaactgtatggaggggacatgaaaagtttagtgctgaattttgcgaaaaatgaagaattaaataacaaagaaattgaagaattgcgagacattttaaatgatattagtaaaaagtaattagagatatgtttcaaacataatacatatgtaaactatgcttgactcttattaaattagttttgttaataacatttaaaatatattattaaagatgagagtgtacagaaaataaccattttctgtacactctctttttatgccgaaataagtgagtaatacatatattttcgtgttcaaaaacccaacaaaaaatctatgttcacaaaagaccttgaaattaagttatggtacactgtatatgtatataggaggtttgtattttgaaaataggttatgcaagagtttcaactggattacaaaatctgaatttacaggaggaccgattaaacgcatatggttgtgaaaagatatttagcgaccatattagtggttcaaaaagtaaaagacctggattagataaagcaattgaatttgcgagatcaggagatacgattgttgtttggagactcgacagactaggacgtaatatggaggatttaatcacattagttaatgagcttaacgaacgaggtgtaagtttccatagtttagaagaaaatataacgatggataaatcaagttctacaggacaattattatttcatttattcgcagcgtttgcagaatttgaacgaaatttaattttagaacgttcttcagctggccgaattgcagcacgtgctagaggacgctatggaggtagacccgaaaaattaaatcaaaaagatttaaacttacttaagacactttatgataatggcacgccaattaagacaattgcagagcagtggcaagtttcacgtacaacgatttatcgttacctcaataaattggaggaaaaggaagatgaaaaacaaggagaagtatctaactaatttttctgaagccaaacgtaaagaagctactcaaaagtacaatattataaaaccttttatcttgggcaagcaatctttatcaagcatttctaaaagcaaaggtattgcgttaagtacactttataggtggaataaattatataaggaacaaggtcttactggtctaattcataatacaagagttgataaaggtgagcataaattaaaacaaaacataatagacgagattaaacgccttgcactcaagaataaaagaaatagtattgctacgattcataggaaaatcgctaattattgtatagagaataatttttataaaccaagttataaacaagtttatagtattattaaagcaatgcctaagtctgttattgatttctctcaccaaggtgaaaaatactatcaaaataagtacgatttaatacaaataagagaatcctcaagacccaatgaaatatggcaagccgaccatactttgctagatatttatatattagatcaaaaaggtaatatcaatagaccatggctaaccattattatggatgactatagtcgtgcaattgcaggctactttataagttttgatgctcctaatgctcaaaacacagcattaacactacaccaagcaatatggaataagaataataccaattggccagtatgtggtatacccgaaaaattctacacagatcacgggagtgactttacctcgcaccacatggaacaagtcgctattgatttgaaaattaacttgatgttttcaaaagttggtgtccctcgtggtcgcgggaaaatagaacggttttttcagacagttaaccaaactttcttagaacaacttcctggatatataaacaataatgatacttctagcgatttaatagattttcaaaatttcgaagaaaaattacgatactttttaattgaagattataatcaaaaagagcacagtgctatccagagcactcctatcaatcggtggaacagtaatcatttttttcctaatatgccaagcagtttagaacaacttgatttattattattagaaatacctaaatctagaaaaattcattcagatggtattcattttcaaggctttagatacagtaatacaaacctaactgcttatgtaggtgagtatgtattaattcgttacaatcccaatgatatggctgaaatacgcgttttttatagagatgaatttctttgtacagcaatatcccctgatttagctgattattcaattgatataaaagagatacaacacgcacgtagtcagagaagaaaacacttaaaacaaaacattgctagtccaagcaccactgatttaattaaggaagaaaaaagttatggttactcacctcaagaaacgaccaaaaacgtcaaaaaattaaagaggtatcgtaatgactaaaaatcagaatttcattgaaacgaaagagtataaacgatttgctgaattttgcgatgcttgtatcaaatatcaatatattgggatctgctatggtcaacctggtgtcggaaaaactttatcttctaggtattacacaaattggaatactattgaaaagcaagttaatcatagagggtgggaagatctagctagtaaaacgactgatgatatattatcggtgaataagatattttatactgcaccggctgaaaaacaaacaagattaagtaatgatctatatagtattagtgcaagtattgatttgggtcaaaaattacacatcgtaaataagtatggtcatgatcatagtaaacattatagtgatatgtttaaatatattgatttaattatagtagatgagattgatcgccttaaagtgcaacatttagagcaattaagagctatttatgatgaacataatttagcaatgatatttattggtatgccaggtatagagaaaaaactatctcgttatcctcaactatattcgcgtataggttttgcacatgaatttgataatctaagtaaagacgagacgcatcatatattagaatataagtggcaagatttaggatttgatctaaaactcgaagattttactgattatgaggcaataacgacgattattaaaattacaaaagggaattttaggctgattcatcgtttatttgcgcagatagatagaattatggatataaatggcttagataaaatcagtacagaagttgtagaaacagctagagatagtttagtcataggtattcgttaatagaaaaagcaatgtactttaatataggacattgcttttctcatttactaggtaaaatcattctcatatatcaagtaaagtaacaagagaattagtaaagatatatgggcagtatttaaattactgtatcaaaataaagggcgttttagcattaatgccttactattgcagttaatcatgatttttattagtagtacatacttaattttactatttaatatgatgttaaaagtagctgggcaaagccaacttacgattaacaattggatggaaatcgtaagtcaccctgccagtgtgatacttcttattatattcatattaagtgttgcctttctgatttatgtagagttttcattgttagtttatatggtttatgccggctttgatcgacagattattacatttaaatccatttttaaaaatgcctttgtcaatgtgcgtaaactcataggtgtaccagttattttctttgtcatttatttaatgttaatgatacccattgccaacctaggactaagttcagtattaacaaaaaatatttacatacctaaatttttaacggaagaacttatgaaaacgacgaaaggtataatcatttacggtacctttatgattgctgtatttatattaaattttaaattaatatttaccttaccgttaacgattttaaaccgccaatcgttatttaaaaatatgagactaagttggcaaattacgaagcgaaataagtttcgacttgttatagaaatagttatattggaactcatcattggtgcgattttaacattaattatttcaggagcaacatatcttgctatttgtgtagatgaagaaggagataagtttttagtctcatcaattttatttgttgtattgaaaagctcattgttcttctattatttatttacgaaattatcattaatcagtgtgttagtactgcacttaaaacaagagaatgtattagaccagccgggcttagaatttaaatacccaaaaccgaaacggaagtctaggttctttataatttcaatggtgcttgcagtgacgtgttttatcggttataacatgtacttactttacaataatactatcaatacaaatatctccattattggccatcgtggtttcgaagataaaggcgttgaaaattctattccgtcattgaaagctgctgcaaaagcgaatgtcgaatacgttgagttagatacaattatgacgaaagataaacaatttgttgttagtcatgataacaatttgaaacgtttaacaggtgttaataaaaatatttctgaatctaatttcaaagatgtcgtcggtttgaaaatgcgtcaaaatggacatgaagcaaaacttgtatccttagacgaatttattgaaacggctaaacaatcaaatgtgaaactactagttgagttaaagccacatggtaaagaaccagcagattatacacaacgtgttattgatattttgaaaaagcatggtgttgaacatcaatatcgtgtgatgtcattggattatgatgtgatgactaagttgaaaaaagaagcgccatatctcaagtgtggttatatcattccgttgcagtttggtcattttaaagaaacatctttagatttctttgtcatcgaagatttttcttattcgccaagacttgttaatcaagcacactcggaaaataaagaagtctatacttggaccattaacggcgaagaagatttaacgaaatacttacaaaccaatgttgatggtattatcacagatgacccagcattagctgatcagattaaagaagaaaagaaagacgaaacatacttcgatcgttctataagaatattatttgagtaatataaacaaagacctctaaagttatcaagatgatatcttcagaggtctttttaacgttgccatctatggtataggcaatcgtttcattcgtttataatcatatgacaaggatttataaggaaatttggcgtcacaaacacttacatgatttattggtgaattattaattgttttgtgaatgcaaagggttagaaattgaatcgtaaatactttctaatctatgtttcgctttagtcatttgatccaaatttttagtgcgtatagctgatttagcaatatagtgtgcagctaaaatatcgcgtttttgatacgcatctaaatttaggtgcgataatttatttaagtcagtgtttgctattaattcatgtaattgatctacaagcgcttgatgttgatacgtatgtgatgtagtttcagatttgcttgctaatttaataccagtcgtatcaaggagcgccgctttaataccagcaactaaatatgttttgattttcatttgtgttgtcatgctttgttactcctttgatgtacattaatcaaaaaaattatacactattgtatattgcaaagctaattaactataacaaaaagatagttaatgctttgtttattctagttaatatatagttaatgtcttttaatattttgtttctttaatgtagattgggcaattacattttggaggaattaaaaaattatgaaaaagcaaataatttcgctaggcgcattagcagttgcatctagcttatttacatgggataacaaagcagatgcgatagtaactaaagattatagtaaagaatcaagagtgaatgagaacagtaaatacgatacaccaattccagattggtatctaggtagtattttaaacagattaggggatcaaatatactacgctaaggaattaactaataaatacgaatatggtgagaaagagtataagcaagcgatagataaattgatgactagagttttgggagaagatcattatctattagaaaaaaagaaagcacaatatgaagcatacaaaaaatggtttgaaaaacataaaagtgaaaatccacattctagtttaaaaaagattaaatttgacgattttgatttatatagattaacgaagaaagaatacaatgagttacatcaatcattaaaagaagctgttgatgagtttaatagtgaagtgaaaaatattcaatctaaacaaaaggatttattaccttatgatgaagcaactgaaaatcgagtaacaaatggaatatatgattttgtttgcgagattgacacattatacgcagcatattttaatcatagccaatatggtcataatgctaaagaattaagagcaaagctagatataattcttggtgatgctaaagatcctgttagaattacgaatgaaagaataagaaaagaaatgatggatgatttaaattctattattgatgatttctttatggatacaaacatgaatagaccattaaacataactaaatttaatccgaatattcatgactatactaataagcctgaaaatagagataacttcgataaattagtcaaagaaacaagagaagcagtcgcaaacgctgacgaatcttggaaaacaagaaccgtcaaaaattacggtgaatctgaaacaaaatctcctgttgtaaaagaagagaagaaagttgaagaacctcaattacctaaagttggaaaccagcaagaggataaaattacagttggtacaactgaagaagcaccattaccaattgcgcaaccactagttaaaattccacagggcacaattcaaggtgaaattgtaaaaggtccggaatatctaacgatggaaaataaaacgttacaaggtgaaatcgttcaaggtccagatttcccaacaatggaacaaaacagaccatctttaagcgataattatactcaaccgacgacaccgaaccctattttaaaaggtattgaaggaaactcaactaaacttgaaataaaaccacaaggtactgaatcaacgttaaaaggtactcaaggagaatcaagtgatattgaagttaaacctcaagcaactgaaacaacagaagcatcacattatccagcgagacctcaatttaacaaaacacctaagtatgtgaaatatagagatgctggtacaggtatccgtgaatacaacgatggaacatttggatatgaagcgagaccaagattcaacaagccaagcgaaacaaatgcatacaacgtaacgacaaatcaagatggcacagtatcatatggcgctcgcccgacacaaaacaaaccaagcgaaacaaatgcatacaacgtaacaacacatgcaaacggccaagtatcatatggcgcccgcccaacatacaagaagccaagcgaaacaaacgcatacaacgtaacgacaaatcaagatggcacagtatcatatggcgctcgcccgacacaaaacaagccaagcgaaacaaacgcatataacgtaacaacacatgcaaacggccaagtatcatacggagctcgtccgacacaaaacaagccaagcgaaacgaacgcatataacgtaacaacacatgcaaacggtcaagtgtcatacggagctcgcccaacacaaaacaagccaagtaaaacaaatgcatacaatgtaacaacacatgcagatggtactgcgacatatggtcctagagtaacaaaataagtttataactctatccatagacatacagtcaatacaaaacattatgtatctttacaacagtaatcatgcattctatgatgcttctaactgaattaaagcatcgaacaatcggaagcatatttctaaattatttattcattatagtcttaaacataacatgacctaatatattactaacctattaaaataaaccacgcacatctatgtgacatacgacaatcacagcaataataattgctttagaaagtcgtaccgaactggaacttacaagtctagttcgaacacacactgatgtgagtggttttctttattttaaacatgaacaatcagataagttactagtagtagcaaatattattaaatcaaagggcttcgattcataaaatttaaaacaatgattaaaattagacgtgtaaatgttaaattctaaaacggaaatacccgctatcctattaaaccactttttggttcaatcactatatttcacacagtttcaataataaaacgaatctgcttcaatccgcttcaacttcagcctacttcattcaataacaaaacgaatccgcttcattcaaaatcaaccattctaacgcacatactcaaatatagcagctgcacccataccgacaccaatacacatcgtaaccatgccgtaacgactatcgggacgtctacccatttcattaagtaaacgcgcggttaacattgcgcctgtagcacctaatggatgacctaaagcaatagcgccaccattcacattcgtacgtgatatatctagacctacttctttaatagatgcaatcgtttgagaagcaaatgcttcgttcaattcgattaaatcaatgtcttcaacagatagattgctgagtgacaatacttcaggaatcgcatatgcaggcccaatacccataattttcgggtcaacgcctactgccttataaccaacgaatcgtgcaataggtgtcacgcctagttctttcactttatctccagacattaaaactacaaatcctgcaccatcagaaagtggggcagatgttcccgcagtcacagtgccgtcagctttaaatactgtacgtaatttggctaatgcctccatcgtggtgtcaggtcgtataaattcatcttggtcaaagatatttgtgtgtacttttggtcctacgtttgtatattcaactgagtttacttgtattggaataatttcatctttgaaccgaccatcacgttgtgcgtcataggcacgctgatgacttctgacagcataagcatcttgatcttcgcgtgatacgtcaaattgggatgctacattttcagcagttaaacccataggatatgacgcacctatatcatcatattgtaaggtaggattgtttgtgggctcgttgccacccattggtacggcactcatcaattcaacgccaccagctacaagtatatctccttgacccgccataatttgattggctgcaatcgcgatggtttgtaatcctgatgagcagtagcgattcactgtttgacccggtacagtgtcagataatcccgtacgcaatgcaatcgttcgtgcaatgttttgtccttgtaatccttctggaaaagccgtaccaacaatgacatcttcaatcatattcttattgaattttccgtcaatacgtttcaatacgccttgtaatactttggctgcgacatcatcaggtctttcgtggaataatgcgccttgctttgctttcgctgcggctgaacgcccataagctacaatgtatgcttcttgcatggttatcatcctctcttaatgactatcttttaattacgtaatggcttaccagtttttaacatatgcgcaattctttcatatgattttttagattttagtaagtcaataaagccaattttctccaacgattgaatgtaacgttgattgataaatgtatttcttggtaaatcaccacccgataaaattgtggcgatatttaaggcgatatgataatcatggtcgctaataaaatgaccgtgtctttgcgcatctaattgtccttggatcaatgctttgaagtcttcgcctaaagcgatatattgatgtctaggattcggaatatagtttgtttctgcttcatatttcgcacgtttgagcgcaacttcgacacgttgtgctgtattgaaaataatcgtatctgtatcacgtaaataaccataacgacgtgcctcaaaggcatttgtagagactttcgcaaatgcgatattcgtcagtacttttgtcatggaagcttgtttgtcatcaaacttatgcgatgtgcgtaatatgcgatcagccatttctgcaaggccacctccactcggtaataagccaacacctgcttcaacaagaccgatataagtttcacttgcagcgacaacaataggtgagtaaagtacaagctcacaaccaccgcctaaggcacgaccttgaacagctgtgactactggtttcaaactatacttcaaacgattaaagctataatgtaatttatcaattgattgtgcaacgacatcatctacaagaccgtcttcatgcgcctttttcattaagaaaaggttagcgcccacactgaaattattaccatctgcataaataaccatacttgtgtaatgttcattttccagtaaatcaatcgcatcaactaacgcatcgttgaattcatcggtaatgacattatttttactttgtaatttcagtaacagttgatcattatgagttacggaaagtttggcatcacctttatcccaaagttcatcttttacgaagtgagaaacaggcgttgcatattcaatggtctcatcttgtttataaaagccaccgtctaaatcactaatccattgtggtaagtctccaagttcgtcttccatacgtgttttaacacgttcatatcccattgcatcccataattggaatggaccaagtttccagttgaacccccagacaagcgcacggtctatgtctcggaaatcatcggtagctttaggtacattgatagcagagtaatagaaattattacgtaatgtctcccataaaaatagtcccgcttcgtcttgcgcattgaatatgacatcaaggttatgcactaagtctttattaaattcatttaaaattggtaattgtggttgcgatacaggtacataatcttgtttttcaacatcgtaaacaagtcgagctttagtttctttatcctttttgtaaaatccttgttttgttttacgtccgagtgcgccattttcatacaacgtatttacaattttgacatcatgaaaataaggtgtttcttcaggtacttgttgcatgcctttaattacagacactgcaatatctaaaccgactaggtcagatagggcatatgtacctgttttaggacgaccaatcgcttgcccagttaaagcatccacatctacaatgcttaacttgtgttgctcggcgcgatacataatatcattcattgtttgcgtgccgactctatttgcgacaaagccaggcacatcattgacaacaatgacacctttacctaacacattttgcgcgaaattttttacatctaatataatagattccttcgtgtgtgacgtaggtattaactccactaatttcataatacgtggtgggttaaagaaatgtagaccaaagaatcgttcttgatccttctcgttaaatgcttgagcaatcgcattaattggaatacctgatgtatttgtagcgaataaagcatcttctttagcatgttgtagaactagttgccaaacagcatgcttaatttcaatatcttctttgactgcttcgatatataaatcagcatcatcatttaccaagtcatcatcaaaattaccatatgttaaatgactcgctagatttaagtcgaatagtagcggtcgtttcttatctgtaattttatcgtaagattttttcgcaatgagatttggatcgtttttgtccactacaatatctaatagttttactttaagtccagcattcacaaagagtgctgccagttgagcgcccattgtgcctgcgccaagaacggttactttattaattgtcatagtgattcctccaatttagttgaggataagataaccattaagataattggaataacgttgctattttataaaattaattaagtatctttgacagtcatcttagcctcttatttaaggaaaaagctttatgcttaaaataagtctttttttagtgaaattactgcatcacatataattctttgctatttatacgaaagcagaatctccagtcaaagcgcgtccaattactaaggcattaatttcatgtgtgccttcgtatgtgtaaatcgcttctgcatcagagaagaaacgtgcaatatcataatcgtcagctagtatgccattaccacctgtaataccacggcccatagctactgtttcacgcaaacgtaaggcattcatcatcttcgcggttgaagttgcaacctcatcatattcaccatgtgcttgcatattagctaattgagcacatgttgccattgcttgagctaaattaccttgcatcattgctagcttttcttgtattaactgatatttactaattggtttgccgaattgcttacgctcagtgacataatctaatgtggcacgtaaagcgccagccataccacctgtagccatataagcaacgcctgctcttgttgaataaagaattttggcaatatctttaaagcttgttatgttttgtaagcgatccgcttcatctactttgacattagttaatttaattagggcgttaggaacaatgcgaagtgcgattttattatcaatgacttcaatatcgacgccatcttgttctggtctgactacaaagcaatggggtttgccagtttctttatttactgcgaatactggaatgacatcagatacatgtgcaccaccaatccatttcttttcaccattgataacccaagtatcgccctggcgttcagcgactgtttcaagacctcccgcaacgtccgaaccgtgttctggttcagttaaagcaaagcatgtacgcagttcatgtgactgtaatttaggtacatatttcgcaatttgttctttgctacctccgaaatagaaagtgttatgccctaaaccttggtgaacaccgagtagggtagctaaggaaatatcaaatcgcgcgagtaggtaagacatgaaaaactgaaatagttgactaggcattttggcttttggacgatccttgtatagtaatggattgttaaaataatttaattctcccagatctttaaaatagtcctcgggtacagtagcgtctatccaatgttgattaatattttcacggtacttactttctagcaatgaatctacttgttgtaaaaattcgacttcaccgtctgttaaacctttagcaatactaagtacatcttcaggaaataatgtttttaagactgtttctttttcaaatgtcatataaattcctcctaaaaataatatgaatactaatgtgaaatgcatttaattcaaaacaacacgctttatttgtaaacgcttacactaaatgctaaaaattttttatcacctttaaagtgtttgtgagactttgtcattcatcatttgtcgaatcgcaagtttatctggtttctgcgtactgtttaacggcatatgtgtcactggtacatacattcttggaactttataacctgctaaacgacttcgcatatgttgatctaaaatttcagcgtaatgaggttcatcttcacgaagtataatggctgcagcaattgactcaccatattttggatgatcatagccaacgaccacacaccggtctactagtggatgctccgctaaagcattttcgacttcggatggtaagacattttcgccaccagttatgattaattcttttttgcggtcaataataaatatatcgccatcgtcgtccatcttcgctaaatctcctgtcaataagtaacgaccatgaaacgctttagcagtctctgctggtttattccaatatcctggcgtgacatttttagccttaattgcaagttcgccaatctcaccagtaggtacttcttcaccgttatcatcaaggatacgtgcatcaacaaacatgactgctttaccaatactcattggtttacgttttgaattttccggtgtattaacaagtacaagcggtgcttcagttaagccatagccattaataatgtttatgccatattgcttaaaagctgcttggatacttggtaatggttgtgaaccaccttggatgatataatccatagctttaaaattttcaggattaaaattactagcacgtagcgtactataatacattgtcggaatcatgataataaatgtagggtgatattgtgcaatcatgtcattcaattcttcgccgttaaagtaacgttgaagaataagtgttccacctgacattaatactggtaatacagtatcgttaaaccctaaaacatggaacattggtgttgatacaatcgtaatatagtttgaattgaacttgtacgttagctctaagtttgcgccgttatgaacaaatgattcatatgagaacatcacacctttaggtgatccggttgtaccacttgtataaattaatgctgcaagatcttgtggttcaacaggtgttgcttgaaaaggttggtgataatctggatttacgatttcatcatattgcgctacatcaatatccatatgcaataagttttggtcaatatcggtgagtgaacttaaatgtttttcagcatagaagagcagttttaattgtgcatcttccacaatggctgcaatttcttttgggttaagccgccaattcaatggtaaaaaaaccgcacctgttttaaaacaagcaaataataaatctaatattgcaatatcatttggcgcaaaaataccgataacatcgccttttttaacaccttgagatgttaaataatgtgccatattatcagcgcgtgcattgagttgttggtatgtccaagatgtttgttttgcgtgatcaataacggcaggcttgtcatcatcgaagtctgagcgcgtttttatccaatcgaaattcattagtataccccctttagcttcactttcatactttatgaattgattgtttaagttctccccatttttctttgtaaatgctggtatcaattaattttaaatgatcagcaataattggtttaaaagccatttgattcaaaatatctttatgcaaatcaagacctggtgcaatttcaattagtttcaagccttgattggtgagctcgaatactgcacgatcagtaacaaaatagacttcttgctcgagtgattgtgaatattgtgcattaaagtcgatatggctcacatctgatacaaatttctggttttgtccttcagtttcaatgtttaatcgttgattatgacatgagacatgactgccagctacaaaagtacctgaaaagataattttatttacagattgtgtaatgtctataaagccgccacatccatttagtcggtcattgaagtaagacacgttgacattgccgtattgatcaacctcagcaaagctaagataggcaactgatacaccattgttataaataaaatcccatgctcgatcatgaggcatgcgcacatctgcattgtaattcataccaaaatgttcacgactcccaacgaatccaccgaaaatgccaacatctagaatcggttgcacatcatgttcaacacattcttcatgcaataaattagagagttcattattgatgccataaccgatgctaattgtatcgccataagttaaaaactgagcagcacgtcggagaatcaacttgcgactattaaaaggtaatgcgggttcaggtattccatcaatccgttcttctccagacaaggctggtaaataatgactctgaattacttggcggtgattcttttcatcttctgtgacgtatacataatcgacaagatttcctgggataacaacttcattcggctttagttgatagtcgtcaactaaatctttaacttgtacaataactttcccatgattggctttcgcgtttaatgcgacatgataacactcgctcaagtaagattcttgagttaaataaatgttaccttgttgatctgcgtatgttcctctcagtagtgccacatcaacgctagggaatgtgtagtgtaagtatgtttcatcgtcgatagttactaatgaaactaaatcatcagttgttcgtgtatttactttaccgccaccgtatctaggatcaacagctgtgtttaatccgattttagtaataactcccggtaataattgattactctgacgataatgagttgcaatgataccttgtggcaaaaaataagcttcaatgtcattatttttcattgcttgtgccgttttggaagaagccgttaaaatgctcataatgacacgtttaatcatgcgacgttctataaaatcatctaaatccggtgcgacacctaaactatggatatcattcgctaatataaatgttaaatcattgggcgtatgatatgtgtcatgttgcgctaacacagcacgtagaacttcggcgggtaagttggctacagctaatgctggtaaaccaatcacatcatcatctttaatgatatgttgtaagtcgtgccatgtgatttgtttcaagcaagtcacctccatcacatttgataaaatgtagcgtttttacactttgtgtaaacccttacaagaaatataacataacgacgtttaaaatcaattagaaatatctttttattctgataatagacacagtatagacacattttaatagtcgataacaattgtaatatcaagggtttgtaatgaattgaatatcattaaaatacttatataaaaatattgctcggaatataaaaagtaacccatgtttatttaaaaaatgcaaagactaattatcattttgatgcatcagtaaggcgagggtgatcagcgtacaattagtggtgtataatgtaactgataaaatcattggagagttgaaggagatgttaaacatatgagagtcaatgttttacaacatacaccaaatgaaggtgttggatacataggtgagtgggcgaaggaaagagggcacgaagtctatatttatcatccatatatgaatgatggcgtgctacctcttgcggaagaaacggatatgttagtgatacttggtgggccaatgaatccagacgatgagatgccttggattcaatcagagcgccaattaattttagtattgatggcacaaaacaaaccaatttatggtgcttgctttggtgcacaacaaatttcgaaagcattaggttatgcggtgttaaaatcaccagtaaaggaagtaggttgggatgatgtttacttagaatcagaaatcattccgaatataccaagtcgattgaaggcactacattggcatgaagatatgtttcaaataccgcaacaagcagaattattattttcggggaaccatattagaaaccaaggatttatcatcgatcatcatgtgattggattacaatttcattttgagcctggtccagacgatgtcagagaaatagtactaaatgatgcccaatacatcaatcattctattttagagcaatcggcggaggacatattagcctttgaggtgcctaaacagaataggcaggccattttccgaatacttgattttattactcaagcgtaagatgtgagttgtattttaaaatgagtaaaaaaaacgaatgtacacaatcgaacaaagtagttatataaatatatggaaaatccatcaatattaaattaaaatagttttattatgaaaagtgaaagtaggttagtctatggaaggtcttaatcatcaaagaaatacagaaaaagaagagacaacacaaacgcaatcagttgcacctaatacaggtgaagaagggatgtcatcagcaagtacacaatctactaagacatccgacatacataatgaatctatcgataaacaaatggaagccaaagcgcaggaaacagcgcaaaatacagatttaaaaaatgaagcaagaagtttatttgataatgcaaccaaatcaatcggtagactagctggcaatgatgaaagcttaaatcttaatttaaaagatatgttttctgaagtatttaagccacatactaaaaacgaagcagatgaaatatttattgcgggtactgctaaaactacgccagcaatttgtgacatatcagaagaatgggggaagccatggctcttttctcgagtattcatcgctttcacagtaacatttattggattatgggtcatggcagcaatttttaataacactaacgcgattccgggtctcatttttataggggctttaacagtaccattatcgggtttgttctttttttatgaatcaaatgcgtttaaaaatattagcatttttgaagttattatcatgttctttattggcggcgtattttcattactaagtacgatggtattatatagatttgtcgtttttagtgatcaattcgaaaggtttggttctttaacatttttcgatgcatttttagtaggattagttgaagaaactggaaaagcgctcattattgtttatttcgtcaataaattgaaaacaaataagattttgaatggattattaatcggtgctgctattggtgcagggttcgcagtttttgaatcagcaggttatattttgaatttcgctttaggggaaaatgtcccattattagatattgtcttcacacgtgcgtggactgcgattggtggtcatttagtttggtcagcgattgttggtgctgcaatagttattgcgaaagaacagcatggctttgaattcaaagatatatttgataaacgctttttaatattctttttatcagccgttggtttacatggcatttgggatacatctttaactatacttggcagtgatacgttgaaaatatttattttaatcgttattgtgtggatacttgtattcattttaatgggggcaggtttaaaacaagtgaatttactgcagaaagaatttaaagaacaacagaaaaaagtagacgaataataattaaagcttatgttgcacatatgtttgtgacataagctatttttataatttgtctttaaaagagtggaagtggaatactttttggagttaaaaaagtgtttcacgttaaacaaatagtgacaattaggtttatataaaatgaacatgattcgctgaaagtatgtaataatcattttattgaaattcatcaaacagaaagtaatacaatcatataagcaaattaaaccacgccatcatcatctagaatgacttcggcgtggtttttattgaagcggggctgagacataaatcaatgtcccacattcccttatcgttcaatcgtagttcgataatcgattaaatagataccttcaggtgttactttataatttttaaccttagagttagcagcaactatttgatcgttgtaagcaatataactgttaggtacatctcgacttgataatttaataatatcattagaaatattgtgacgttccttaacatctacagtatgattcaattgattaattaaatcatcaacgttgttattattgtagtctcctttattaatagcaccatcttttttatatgcttgattaaagaaatagcctgtatctccacgaggaatcgttccgaaactatacattgttgcatcccatgcagaacggtcttttaagtaaccttctatgtcatcaacacttttaatgtcgatttcaatatttgcttttttagcatctgattgtaatacttgcgcaattttcgatagctctggacgaccgtcatacgtaattaacttaatttttaaagggtgttcttttgtgtaaccatctttagctaataacgtttttgcttgttcgatattttgtttggttaacttaggttctttaatatatggaattttatcattaaatggactcgttgcaggtttcgcgtaaccttgataaatatgatctgcaataccttgtctatcaatgatatgatctaatgcttcacgaacggatttagtcatttttttattagtatgattatacataagtaaagaagttctaaatccagattcttttgacacttttaaattttgattattttctatgtcttgaactttattaactgggacatcagttattaaatcatctttttgagattctaaatttctgacgcgattattgccgtcttcttggtacgtcacagtaatatgatcaagtttcggtttaccttgccaatagtccttaaaattcgacaatgatatttttcgagattgcttataatctttaatttggtaagggcctgtaccaacaggagtttgattaacatctgatttagcatctgtatcataaattgccataaaaggattagctaattcagatacaagttcagggtaagcggaactggttttaattgttagtttttgacctttagcggtaattgatgatattggtaatgaatatttgaccaagtcgctttttttcatgctattttcaaggctagatttcactttttctgcagtcaatttttgaccgttttgaaatttaatattatcttttaattctatatctaacgttgtatcatttggttgatgatacgatttcactaatactttttctatttttccttgatcatttgttttaaataatgattctgcagcaccgatcttaactggtacatctgtttcataaggtgcaatagactttgtttttaacggtaacgaaatatttaagtctttgccagatgaatgcattgagccacatcctgataacactaatactgctgaaaatatagttgctagtcttttaaacttcatttcattaacactctctttctaattactatgtaaaacccaacaattaatattttaaaactttattttgttgaagtaaaatgttgttcaagttcagtaattattaaagttcaattaattgtagtaattacactttttaaaaataaatattagaaatgaagttagcgacatgtatagtgatccacgataaacatatatatctaagtattgagcaactgctgtagtactacagcttggttatgtttagtatcttttgctgaatataacaatagaacatgatgatgttgatttacaattgcctttaatttttcaaaagcttctttttgcgtctcattgtcacgcaattctttttcgtatttttctttaaaagcaccataaagtttaggatcatgttggaaccattgtcgtaactcagtagaaggggcaatgtcttttaaccaataatctaggttagcagttcttttcgaaatacctcttggccagactctatcgactaggatacgaatagcgtctgtattatctttattgtcataaatccgtccaatatctacggtcatcttgtgaactcctttcttatgaaattcagtgagcatacatcaatgcatgttgtggtgggacgacgaaataaattttgcgaaaatattatttctgtcccactcccaattaaaaaacaaccatgacaaagtaaagtcatagctgtttttgtatagatgtcatttatttttacgtttagttaaatacttcaaaccaactgcaaagacggtgtaaccggcaagtgtttgaatcaatgttttgattaaattgttatttttgacaacaatatttgcggtaacaatactcgcgaaatataatgcaaatactttaacgtaacgttgattaagtttcatatgagcactaacctcttttctcagttatactacaacgcttagtcttggaataaatgtttcgtagtgtacgcgatccatatcgtaatttaaagatttaagtgcttcgatcatagattgtaagaattttgtaccaccacagatataaatttcaggtttatttgctaaaaatgcttttaattcttcagcaccgatataaccttgttcgccttttaagtgggtatataatttagcgttgtcataatgatttgcaatactgttgaagttgtctttgaaaggtaaatgttgttcattttcagcaacttgaaccatctgagtatctaaacctttggcagaggcagcttcatacattgctactaaaggtgtgacgccaatacctgaacctaagaaaagttgtggttcagtcgtattctctaatacgaatccacctacaggtgcagctaaattaatcatatcgccttctttaatctcatcgtgtaaaattgttgaaacttcgccttcatgttctgttgtgacatcacgtttaacgccaaaggttaaatgatttttatcacctgatacgatagaatagtgacgtttagctctatatggaagtttatcactagaaacatcaactgtgatgtattggcctggtacatattgactaaagtcatatgcatcagtttcaactgtaaatgatttaatgtcttcagattcttgtttaatattggtaattttgaatggtttaaaaccaatccacatcatttgatcataaatttctttttcaatttggatgaacacatccgcaataacgccatatgctttcgcccaagcttgaatgacagggtcattttcttctaatcctgtcacgtcttgaatggcttttaataaattttcccccacaattggataatgttcagcataaacttgtagtgcgcagtgtttatatgcaactggcataataactggtttaataacacttaaattatcgatattaaccgctgcggccattacagcttgtgctaatgctgaagattgcatgcctcttttttggttcgtttgattaaacatatttaaaagttcaggatgtgccttaaacatttttggataaaagattgacgtaatttctgttcctttttctttaagcaatggcaccgtttgtttgataatgtctttctcttgttctgtaagcatgatactcctcctttaatctgtctattttgattattctactaaaaattccgatattcaattaattggtttgagaaaatataaataaaatggcaaatttgataattgtatgacatttttaattttttaaatacttatcaataagcattgtgtacaattgtctgtttgtacaccgacgattgcgcgcatttatttgactaattcaaaaaacattgttgttttcttagaaaaaagtaaacatgataataaaaatgtgaaagtgtaaataatcactggcgaagtacgaagactaaagacatctaagatgtaatcgtatacaaattaaaaaggtgtaaaaattaaaataaaatgtgaaataaatcacaatttaatattgacccagtacttaatgcatgttacattttatatgtgaaataaatcacaaacttaaaagcggatgacacatgaccttttaagttatgcgttgaaaataaaagagatgtttatttgcttttgtatcgtcaataagcagcattaaactaacatatttgaaactacacgtatgttagtgaattaatcataagggagtttttgtaatgaacaaatttaaagggaacaaagttgtattaataggtaatggtgcagtaggttcaagctacgcattttcattagtgaaccaaagcattgttgatgaattagtcatcattgatttagacactgaaaaagttcgaggagatgttatggatttaaaacatgccacaccatattctccaacaacagttcgtgtgaaagctggcgaatacagtgattgtcatgatgcggatctagttgtcatctgtgctggtgctgcacaaaaacctggagaaacacgtttagatttagtatctaaaaacttgaaaatattcaaatcaattgttggtgaagtaatggcatcaaaatttgatggtattttcttggtagctacaaatcctgttgatattttagcgtatgcaacatggaaattctctggtttacctaaagaacgtgttataggttctggtacaattttagactctgcacgctttagattattgttaagcgaagcgttcgatgttgcgccacgtagcgtcgatgctcaaattattggtgaacatggtgacactgaattaccagtatggtcacacgctaatattgcgggtcaacctttgaagacattacttgaacaacgtcctgagggcaaagcgcaaattgaacaaatttttgttcaaacacgtgatgtagcatatgacattattcaagctaaaggtgccacttattatggtgttgcaatgggattagctagaattactgaagcgattttcagaaatgaagatgctgtattgactgtatcagcattattagaaggcgaatatgatgaagaagatgtttatattggtgttccagcagtcatcaatagaaacggtattcgcaacgtcgtagaaatcccattaaacgacgaagaacaaagcaagttcgcacattcagctaaaacattaaaagatattatggctgaagcagaagaacttaaataactttttataaaatctataccattccaaaaattgtaaaaccttaccccaaaaaattgtataaagggctatttgatacaactatacgtgtcgagtagccctatttttaatgtagtgaaagtcgttgttgaaattaaatttaaatctggcacttaagctttaatcatagcattaagatgattgtctagcagaggcgatttgcggactcactacagtgcatgatgaacttaatgtttcaaatgcaacattaaaaataaaagcagcgatgtcacttcttactccgtacatcgttgccattagttctgttgatatttcggttagtcttaatccccgagcaattcttcaatttcatttttgataactgtaacgtgaggaccgtaaattacttgcacaccagtgccttgctggattacacctttggcaccagtactttcgagtagtactttatcgactttgtcattttgatgaagtgtaacgcgtagtctcgttgcacaacagtcaacgatttcaatgttatccttgcctcccaaaccagcaacaatagtttgtgctctttcagtagcctcaacttgttgtgctgcagctttatcttcacgaccaggtgttttgaaattaaatttcgtaattaagaatctgaaaacgatgtaatacaaacagaaccacacaattccaataggtatgacatataggtagtttgttttactattaccttgtagcacaccaaaaagtaagaaatcgataaagcctccactgaaggtttgaccaattgtaatgttgaaaatgtctgccatcataaatgctaatccatcaaagaaggcatggattacataaagaataggtgcgacaaacaagaaactaaactctaaaggttcggtaatacctgttaaaaatgaagtgagtgcagcggataacattaaaccgccgacaacttttttatgttcaggtttagccgtgtgataaattgcaagtgcggcaccacataagccgaacatcatcgtaataaaacggcctgacataaagcgtgacacacctgaataatacttcgtcacatctggatcaccaagttgagcaaagaagatgttctgcgtaccttgaactaagtgacctttgacttctaaagtaccaccaagtgccgtctgccaaaatggtaagtaaaaaatatgatgtaaaccgagtggacctaacaatcttaagatgaagccataaacaaaagtaccgatggcacctgttttcgttacaaatccacccacatgataaatgccggcttgtatgcttggccaaatgaaaaacatcaatacacctaaaaagattgcggcaaatgctgtgacaatagggacaaatctagagccaccaaagaaacctaaatacggtggtaataccactttgtgatatttgttgtgaagtattgcggtcataatacctgtgataatcccgccaaaaacaccggtttcaaccgtttgtataccgagcaccatgccttgtccattttgtgcaagctgatcttttgccaatgtgcccgtgatagttaataagccattcatagttgcgttcataattaagaaaccgagcagtgcagctaaacctgcagtacctttatcgcttctagataatccgattgcgacaccaattgcaaagatgactggtaaattttggaaaacaatactacctgcagctgacattaatgtaaaaatattttgtaataaggtaatatctaaaatagggtatgctttaacggtgtttggattacttaatgcaccaccgatacccaacaatagacctgcagctggtaagattgcgataggtagcataaaggacttgccgaactgctgtgctttttcaaataaagatttcatcaacatccctcctaattattctcaatatagcttttgagaaatttaatatcaatatatattctgtgtatgaaaatatttttcataaaaattgtttgaatcatgtaacaatcatataaattgctgtttatattgtggtgaaaatgagttgacaaaagtcggtatagttctgtagacatcctattttttagcgaggtggggtgacaaggcatatcggataaatttataagccataaaatagataaatagtgtttgtatccaaaactatgtgaaagttaaaactatttttcaaaataaacatgattcaccacataaataaatatacataagctatcgataacaacttaagaaaggtggatatatataatgaaaagaaagattattatggattgtgatccaggacacgatgatgcaatagcattaattttagcgggggcaattgacagtccactagagatattagctgtaaccacagtcgcaggtaatcaatcagttgacaagaacacgacaaacgccttgaacgtattagatattatgggacgccaagatatagtagtagcgaaaggtgcggataggccgttaattaaaccagttgcctttgcttctgaaatacatggggaatctggattagatggtccgaaactaccgtcgacaccatcacgtcaagcagttgcaatgccagcatcagatgtgattattaacaaagtgatgacgagtgatacacctgtaacaattgtagcgacaggtcctcttacgaatgtagcaacggcattgattcgtgagccaagaatcgctgagcatattgaatctattactttgatgggtggtggtacatttggaaattggacgcctacagcagaattcaatatttgggtagatgctgaagcagcgaagcgtgtttttgaaagtgggattactataaatgtgtttggtttagatgtaacacatcaagttttagccgatgaacacgtgattgaacgctttgaaagtatcaataatcctgttgcacagttcgtcgtagaattattgcaattctttaagaagacatacaagactcactttaatatggacggtggtccaatacatgatgcttgtacaattttgtatttgttacaaccagaattgtttacaatggtacccgttaatatcgacattgaacatcaaagtccactaacttatggcactatggctgtagatttaaatcatgttacaggtaagcctgccaatgcctattttgctacagcagttgatgttgaagaagtgtggaacttgatagatcataagttacgtacatacgaataataatacttaattaaatagatacagttaaccctaaggtgcctgatttaagcgtccttagggtttttgtattggattacaatggtcatggcaatttgataatgattgagatatgtatgttaaaaatgcttcaaaaaacacaaaatacaaaaatatatgcaaaaatttcaattgctttattttaaaagattaaaatcacaaaaaataccgatataattggaatgttgtcgaaacatcacaatgatgtacatactcattttgaaaatatgtgttcaacgagtgtacatcggtgtgacgattgatgataaattgagctcagatgctcaaaggaggatcgaacatgaacggggataatcagcaaatactcagagaaattgtattgaatcctactattcatggtaaagaacttgaatcgatatttggtttgtctcgtagacaactaggatatcgcattcaaaaaatcaatttgtggcttgaacaagagggttatccaaaacttgaaagaacaagccaaggaaattttattgtaagttctgaaatcatgacgttattcaaacgagatgtatcggagcagcaaatgttaaacggcaacaatgtcatttttaacatagaaacacgtcgttattatttaatgctcatgctttttagtaaggaaaacgcaatgtctctaaaccatttttcaattgatttacaagtcagtaaaaatactgtcattcacgatataaatcatgtgaaagagcaattggaagatcatggtttgtcacttaagtattctcgaaaacatggttatgaaattgttggtgatgaatttgaagttcgccgtttcttcattaagttgattgatcaaaggttaaatcatgatattactaaaagtgaagttttaaaggcgctcaacttaacattcgaagatatcgcatatcaaaaagacaagatcaaacaggtagaacaatttttgaagagtcgctttatagacaaatcactgagttcattgccttacgtcctttgtgtgattcgtagacgaattcaaagtggtcatgtgattaatccattaaatattaattatcagtatttgagggatacgaaagaatatcaagcaacggagattatgacgcaacatgagccggatttgccagaagcggaaaagttatatttgacgctacacttactttcaacaagtgtgcaatggactgatttgcaggaatcagataacatatcgaatttaacgatggccattgatcaaatgattcaccattttgaacaaattacttttattaacattgaagataaggagaaattatcacagcaactcttgttacatttaacgcctgctttttataggattaaatataacttaacggatcgtgatgaattaataaatcctttacaaggaaattatcaatccttatttcatatggtgaaacaatcatgtcaatcgttaactgaatatttcggaaaatcattgcctgataatgaaatagcatatttaaccatgttgtttggaggtagtttgagacgtcaagatgaaaacttcgatggcaagataaaagctattatcgtgtgtacacaaggtacgtcagtatcacaaatgatgttatacgagttgcgaaacttatttccagaaattattttcttagatgcgatttcacttagaacatttgaaaattacacattagattatgacatcgtcttttcaccaatgtttgtcttaacacataaaaaattatttatcacaaaagtagctttatctgaaaatgagcaacgaaagttacgtaaagaagtgatgaagtacattaataaggaatcggctgacattgataaggaaataaacaagttaatggcattaattgaacgcactacgacagttaatgacattacagaactacgtgatggtttagaagattttattgcgaattataattcaatttcaaccattaatggatcgattgtcacacaaaataagacattagatttagctgacttgataccagcaaggtacgtgaaaagaatacatcatgttgaaaatattgatgaagctattgctaaagcaagtgatgtgttagttgctaatcattttattgatattaaatatattcatgagatgcaacaggcatttgatgattcgtatatggttatcatgcaaaatattgctattccacatgcatactctgaaaagcatgtacataaaacagcgatgagtatgttgatattacaagaaccaatatacatgtcagatggcacagcaatccatattattgtacctattgctgctgttgataaagtgacacacttaagagcgttactacaattgagagatgtggcgcaaaacaatgacgcaattaagcgcatcatacaaagtcgcaaaaattctgatgtaaatgagattttaaaaaattattcaaataaagaagcgagggaaaatggatgggacagcaattagtgcataaagaaaatataatgctcaatttgtcggcaactgataaagaatctgtattgtcacaaatgtcagatgtgttatttcaaaatgggttcgtaaagtcaacgtttaaagatgcagtcatcgacagagaaaaagagtttgctactggtttaccaacgcatctatgttcggttgctataccgcatacagatgtcgaacatattaaccatagaacgataggtgtggctgttctagaaaaagaagtgccgtttattgaaatgggaacacttgatcaacagacagaagtgaaaatcgtttttatgttagcaatggataaagtagatgatcaacttaagctgttacaacagttgatgcaaatttttcaaagtgaagaaaaattggagcagattctacgaacgaaagatgaaacaattttagcaacactaatcaatgattatttgaaatataactaaaaattaattggaggaattgaaaatgaaacaagtattagtagcgtgtggtgcaggtattgcaacgtcaacagtagtaaataatgcaattgaggaaatggcaaaggaacacaatattaaagtagatattaaacaaatcaaaattacagaagttggaccttatgaagacactgcagatttattagttacaactgcaatgacaaagaaagaatataaattcccagttatcaacgcacgtaatttcttaactggtattggtattgaagaaacaaaacaacaaatcttaacagagttacaaaaataactgaattgatatgtaacgtgggtcaataacatataaatatatgcaaattgcatataaatgactatcacgacaaatgattgtagatgacatagaaacgcagtgactgtaattcaaagggattgcagtcgaatgtagcaagggttgtcgttgaaatgactgtaacgtcaaatgtaatcacaatcggaaagtatcgtgacaatgcatatataacagggagggtttaaatatgagttacttcactgattttgtaaggggatttttagatttaggtgcaactgttattttaccggttgtcatattcttgcttggcctattctttaggcagaaaattggagcggcatttaggtctggtttaacaataggtgtggcttttgtagggattttcttagtcatcgatttattagttaaaaatttagggccagcagcacaagcgatggttaaaaatttaggcgtcagtctgaatgtgattgatgtaggttggccagcaacatcatctatcgcgtgggcatcatctgtcgcagcatttattattccactcggaatcattgttaacgttgtattgctagtaactaaagtgacaaagacgatgaatgtagatatttggaatttttggcattatacgtttacagcagcaatggtttatgccgtatcaggcagtatttggcaagcgttattagcagcagttattttccaagttatctgtttgaaagtagcagattggacagcaccgatgatgagtgagttctttgatttaccaggtgtatcgattgctacaggaagtacaatttcttatgcaccaggtatttacttagttaaattgttacaaagagtacccggtctgaataagttagatgctgatcctgaaacaattcaaaaacgttttggcgcatttggagagtctatctttgtcggattaattttaggtttaggtattggtgtgttagcaggttacaaacctggagacatcattaatttaggaatgtcaatggctgcagtaatggtattaatgcctagaatggtaaaaatcttaatggaaggtttaatgccagtttcagagtctgcaagaacatggctaaataaacgttttggcgaacgtgaaatttatattggattggatgcggctgtagcattaggtcatccagcggttatttcgacagcattaattttagtacctatcactgttttattagccgttattttaccaggaaaccaagtattaccttttggtgacttagcaactataccatttgttgtcgcgtttattgttggtgcagcaagaggaaacattattcattctgtcattgtgggtacgattatgattgcaatttcactatatattgcaacagacgtagcacctattttcacagatatggcgaaaggtacgaatgtacaaatgccaaaaggttcatctgaaatttcaagtattgatcaaggtggtaatatcgttaactatcttatctttaaactatttagtctattcaattaaaaatcgaggtgtttgtggtgaaagctttagtaaaaacaagagaaggacatggcaacttagaacttcttgataaagaagttgcaacaccgctagatgataaagtaaagattaaagtacattatgcaggaatttgtggcacagatattcatacttatgaaggtcattataaagttaattttccagtgacattaggtcatgaattttctggtgaaatcgttgaagttggagcagacgttaaagattttaaagttggtgaccgtgtcacttctgaaacgacattctatgtttgtaatgagtgtgaatactgtgaatcaaaagactataatttatgcaaccatcgaaaaggtattggaacacaagttgatggcgcatttactaattatgtcattgcacgtgaagaaagtttgcatcatattccagacgaagtgtcgtatcagtctgcagctatgacagaaccattagcatgtgcacatcatggcgtttctaagattcaagtcaattcaggcgatgtagcagttgtaatgggatctgggccaatcggattacttgtagcacaagtgttgaaaagtaaaggcgcaactgttgtggtaactggattggacaatgacaaagtcagattagataaagcagaagcattgcacatggattatgtagtcaatttacaacaaacagacttaaaaacgtatatcaatggaattacagacggatacggtgcagatgttgttgttgaatgttcaggtgcagttccagcagcacgacaaggtttggatattttacgcaaaaaaggtttctacagtcaaataggtatttttaaggatgctgaaattacatttgatatggaaaaagtgattcaaaaagaaataacagttgttggtagtagaagtcaaaagccggcagattgggaaccttcattgcaacttatggcggatggtttagtaaatgctgaagctttggtgacaaaaatatatgatatttcgaaatgggacgaggcgtatcaacatttaaaatctggcgaaggtattaaagcattacttaagccgctcgatttagatgaaaatgaaggagagaattaatatggtagaatcaatgctaacttttatgcttgggccattgagacaaatcactgatttttatatggaacatctacttgtaagtaattctatcgtcattgcaggttattttgcgacaggtatttttaaaaagaaaaaagttgtgaattaaatcaaagttgaggtgatttacaagtgaaagctttgaaattatatggcgtggaagatttacggtatgaggataatgaaaagccagtcattgaaagtgcgaatgacgttattgttaaagtacgagcgactggaatatgtggttcagacacgtcacgatacaaaaaaatggggccatacattcaaggtatgccatttggtcatgaattttcaggtgttgtagatgccattggaagtgatgttacgcatgttaatgtaggcgacaaagtgacaggttgcccagccataccttgttatcaatgcgagtattgtttaaaaggtgaatatgcacgatgtgaaaagttgttcgtcattggctcatatgaacctggatcgttcgcggaatatgtcaaattgccagcgcaaaatgttttaaaggtaccagacaatgttgattacattgaagcagcaatggttgagccatcagccgttgttgcgcatgggttttataaatcgaatatacaacctggtatgactgttgcagtaatggggtgtggcagtataggattgttagctattcaatgggcacgaatatttggtgctgcgcatatcatcgctatagatatagatgcgcataaactagatattgctacatcattgggcgcacatcaaaccatcaattcaaaagaagaaaatcttgagaaattcatcgaaaatcattacgccaatcaaatcgatatagctatagaatcatcaggtgctaaagttacgattggtcaaatattgacgctacctaaaaaaggtggcgaggtggtattactcggaataccatatgatgatattgagattgatcgcgttcattttgaaaaaattctgcgtaacgagttgacagtatgtggctcttggaactgtttgtccagtaattttccggggaaagagtggacggcaaccttacattatatgaagacgaaagatattaatgtaaagcctattatttctcattttttaccgttagaaaaaggcccggagacatttgataaattagttaacaagaaagaacgatttgataaagtcatgtttacgatttattagtatgcacctttgaggacgaaaacgctggtatagttatagctatgaaagtgcgaatgccgtctggtctacagatactatcgaaataattcatcttcgaatatacgttgctaaatagccggtttacttgtgtgaaatatgcttgtgaatcggttgttttgcattttgtatacttaaaatgagatggcaatatttgataatttttaaagtgaaaatcaagtacagccacttaataagataaatttattataatatatggtaaaatgatggcagtaataatgaatttgaaaaagagtaaacattaatacctttaacaatttaatatcgtcagtgttaatgattaactgcatggcaaaacaacttagaatggtcagttacaaaaatacatttttataaaaaattatcacactattgtgacaactgcctttggcttaataaaagaggaaagtgagcaataggttgggcttatgtgcgggcataggtcagtaatgtataaatggaaatgatgtaatgacagaatggaggacaacatgatttatgcaggtattttagcaggaggtattggttcgagaatgggaaacgtgccattaccaaaacaatttttagatattgataataaaccgattttaattcatacaattgagaagttcattttagtgagtgaatttaatgagattattatcgcaacgccagcacagtggatttcgcatacgcaagatattttaaaaaaatataacattacagatcaacgtgtcaaagtagttgcaggtggtacggatcgaaacgaaacaattatgaacattatcgaccatattcgcaatacgcagggtatcaacgatgatgatgtgattgtaactcatgatgccgtaagaccatttttaactcaacgtattattaaagagaacattgaagtagcagcaaaatatggtgcagtagatacagtcattgaagcaattgatacgattgtaatgtctaaagataaacagaacatacacagtatccctgtaaggaatgaaatgtatcaaggccaaacaccacaatcatttaatattaaattattacaagatagttatcgcgccttaagtagtgcacaaaaagaaatcttatcagatgcatgtaaaatcattgtcgaatctggacatgcagttaaattggtacgcggagaactatacaacattaaagtgacaacaccgtatgatttaaaagtagcaaatgccattattcaaggtgatattgccgatgattaatcaagtatatcaactcgttgcaccgagacagttcgacgtcacatataataatgttgatatttatggtaatcatgtcatcgtaagacctttatacttgtctatttgtgcagctgatcaaaggtattacacaggtcgaagagatgaaaatgtactgcgcaaaaaattaccaatgtcattagttcatgaagctgttggtgaagttgtattcgatagtaaaggcgtatttgaaaaaggtacgaaagtagtaatggtgccgaatacacctacagaaaaacacgacgtgattgcggagaattacttagcctctagttattttagatctagtggttatgatggttttatgcaagactacgttgtgatggcacatgatcgtatcgttccgctgcctaatgacattgatttgagtacgatttcatacacagagttagtgtcagtaagttatcatgctatacaacgatttgaacgtaaatctatacctttgaaaaccagctttggtatttggggtgatggtaacttaggttatattactgctattttgctgcgtaagttgtacccagaagctaaaatttatgtatttggtaagacagactataaattaagtcatttttcatttgtagatgacatctttacagtaaatcaaataccagatgatcttaaaattgatcatgcatttgaatgtgttggaggtaaaggaagtcaagttgcacttcaacaaatagttgaacatatttcaccagaaggcagtattgctttgttaggcgtaagtgaattacccgtggaagtgaatacacgattagtacttgaaaaaggattaacgttgattggtagtagtcgaagcggctctaaagattttgagcaagttgttgatttatatcgtaagtacccagacattgttgaaaagttagccttattaaaaggacatgaaattaatgtatgtacgatgcaagatatcgtccaagcgtttgaaatggatttatcgacatcttggggaaaaacagtattgaaatggacgatttaataaaccgatgggggaataacaatgacaaaaacgaaacaagcaatacatattgataacatatactgggaacgtgttcagttatatattgaaggacatagtgaaggcgtagatttaacatcaggacaatttgttctgaggaatttaaccgaaacaaaaacattagaagcaaatgaaatgaaaatagacggtaatacatttctatgtagattcaatgtcgcaatattagacgatgggtattatttaccaatggataaatatttatttgtttatcatgaccagttagagtatattggacaacttaatccaaatattattgatcaagcttatgcggcattaaatgaagagcaaattgaagaatacaatgagctgactacacaaaatggaaaagcaaactatgtgttagccaacgaagctaaagttttccgcaaaggtggcgtatcacaacatacggtttataccattactccagaaatagcaagtgacgttaacgaatttgtatttgatattgacatcaccttacctcaagagaaatcaggggtcattgcgacaagcgcacactggcttcataaacaaggccataaagcttcatttgaaagtagaagtttcttatttaaagctatttttaatattacaaagttactacatattaaaagaagcaaaacaatattattcacatcagattcacgtccgaatttatcaggtaactttaaatatgtatatgatgagttactacgccaaaaagtagattttgattatgatattaaaacggtatttaaggcgaatattacggatagacgtaaatggagagacaagtttagattgccatatttacttggtaaggctgattatatttttgtcgatgatttccatccattaatttatacggttcgctttagaccatcacaagaaattattcaagtgtggcatgccgttggtgcttttaaaacagttggctttagtcgtacaggtaaaaaaggtggtccgtttattgattcattaaatcatcgtagctatacaaaagcttatgtatcatcagaaaccgatattccattttatgctgaagcatttggaattagagaagaaaatgttgtaccaacaggtgtaccacgtactgatgtactatttgatgaagcttatgcaacacaaattaaacaagagatggaaaatgaattaccacttataaaaggtaagaaagttattctattcgcaccgacatttagaggtaatggtcacggtacggcacattatccattttttaaaattgattttgaacgtttagcaagatattgcgagaagcataatgcagttgtgttattcaaaatgcatccgttcgtaaaaaatagactcaatatttcacgtgaacatagacaatactttatcgatgtgtcagattatcgtgaagttaacgatattctcttttttacagacttgttgattagtgattattcatctttaatatatgaatatgcagtatttaaaaaaccaatgattttctatgcatttgacttagaagattatattacgacgcgtgatttctatgaaccatatgaatcatttgttccaggtaaaattgtacaatcctttgatgcattaatggatgctttggacaatgaagattatgaggttgaaaaagttgtaccattcttagataaacattttaaatatcaagatggtcgctcaagtgaacgtttagtcaaagatttgtttagacgctaatgttggcatatattacttgccatgcaaatgatcataaggcatagttttcaagaagggttatgacaatgaagtgagcaacatgtcatgatgagaagcaggactatacaatgagaataaccttttgatttttcatgcataagaggctgggacataaatccctaaaaaaacagcagtaagataattttcaattagaaaatatcttactgctgttctctatttatacaatacttcgtattgaatggcttcgctttgcccgtctggcacattactgtaaaattctataaatagaatttttgatgacgggtcccttcctagggtgccgtctcagccaccccaaccggcacattgttgtaagctgactatatgtcagcttctgtgttggggcccctgtcttcgactggcactgctccctcaggagtctcgccattaatactacgtattaacatgtaattttacttttaaatactttgaaaaaataagacactttgcccaacttgcacataaatgtaaaattcaataaaatgaattttctgtgttagggcccacaccccaacttgcattgtctgtagaaattggaaatccaatttctctttgttggggcccctgactagaattgaaaaaagcttgttacaagtgcattttcgttcagtcaactactgccaatataacttcgtagagcatagaacattgatttatgtcccagcctgttccaactgaattgtcattttgtaaaataaaataatcaatccaatcgttatctaattcataaatgtgaaaacacatacgttatgaatggataacgattttttgttatgttaaagtggtacattaatcatgtatttcgtatgataattaacgacaagtgtaatggttaaatgtattttatgctgaaatgctataataggcatggttacaatgagcttgctcatacatattaatataattacaaaaacacgtcggaggtacgacatgattaaaactacaattaaaaaattgatagaacacagtatatatacgacttttaaattactatcaaaattgccaaacaagaatctaatttattttgaaagctttcatggtaaacaatacagcgacaatcccaaagcattatatgaatacttaactgaacatagcgatgcccaattaatatggggtgtaaaaaaaggatatgaacacatattccaacagcacaatgtaccatatgttacaaagttttcaatgaaatggtttttagcgatgccaagagcgaaagcgtggatgattaacacacgtacaccagattggttatacaaatcaccgcgaacgacgtacttacaaacatggcatggcacgccattgaaaaagattggtttggatattagtaatgttaaaatgctaggaacaaatactcaaaattaccaagatggctttaaaaaagaaagccaacgttgggattatctagtgtcacctaatccatattctacatcgatatttcaacatgcatttcatgttagtcgagataagattttggaaacaggttatccaagaaatgataaattatcacataagcgcaatgatactgaatatattaacggtattaagacaagattaaatattccattagataaaaaagtgattatgtatgcgccaacttggcgtgacgatgaagcgattcgagaaggttcatatcaatttaatgttaactttgatatagaagctttgcgtcaagcgctggatgatgattatgtcattttattacgcatgcattatttagttgtgacacgtattgatgaacatgatgattttgtgaaagacgtttcagattatgaagacatttcggatttatacttaatcagcgatgcgttagttaccgactactcatctgtcatgttcgacttcggtgtattaaagcgtccgcaaattttctatgcgtatgacttagataaatatggcgatgagcttagaggtttttacatggattataaaaaagagttgccaggtccaattgttcaaaatcaaacagcactcattgatgcattaaaacaaatcgatgagactgcaaatgagtatattgaagcacgaacggtattttatcaaaaattctgttcattagaagatggacacgcgtcacaacgaatttgccaaacgatttttaagtgataacttaaaaacaataaaaaattataaattaattagttaagtgatataaataataaacgaaatgtttgcttgtatgttattatttgtgtatgaaaacgtctgatataatgtaatatagttttaaacaaaatatgctaaaatataagcaaaatatgtataattttaagtaatacacagacatttagagttttgattttaaaatgagttttcaattgaaaaatgcaacgaaatttaaataattaaatatagatatagttgaatggaggaagtattttatgaaatacgctggtattctagctggaggtataggctcaagaatgggtaacgtacctttacctaaacaatttttagatttagacaacaaaccgattttaatccatacattagaaaaatttattttaattaatgattttgaaaaaattattatcgcgacgccacaacaatggatgacgcatacgaaagatacacttagaaaattcaaaatttctgatgaaagaattgaagtcattcaaggtggtagcgatcgtaacgatacaattatgaatatcgttaaacatattgaatcaacaaatggtattaacgatgacgatgtcattgtgacacatgatgcagttagaccatttttaacgcatcgtattattaaagaaaatattcaagctgctttagaatacggtgcagtagatacagtgattgatgctatagatacgattgttacatctaaagataatcaaacgattgatgcaattccagtgcgtaatgaaatgtaccaaggtcaaacacctcaatcgtttaatattaatttattaaaagaaagctatgcacagttgagtgatgagcaaaagagtattttatctgatgcttgtaagattattgtagaaacaaacaaaccggttcgacttgtaaaaggtgagttatataacattaaagtaacaacaccttacgatttaaaagtagcgaatgctattattcgaggtggtattgccgatgattaatcaagtatatcaattagttgcacctagacaatttgaagttacgtataacaacgtagatatttacagtgactatgtcattgtacgtcctttatatatgtcaatttgtgctgccgatcaaagatattatactggtagccgtgatgagaatgtcttatctcagaaattgccaatgtctttaattcatgaaggtgttggtgaggtcgtatttgacagtaaaggtgtgtttaataaaggtacaaaagtagttatggtaccgaatacaccgacagaaaaagacgatgtcattgctgaaaactatttaaaatcgagctacttcagatcaagtggacatgatgggtttatgcaagattttgtgttgctaaatcatgatagagctgtaccactacctgatgatattgatttaagtattatttcatatacagagcttgtaacagtaagtttgcatgctattcgtcgttttgaaaagaaatctatttcaaataaaaatacatttggtatttggggtgatggtaacttaggttacattacagccattttattacgtaaattatatccagagtctaaaatatatgtctttggtaaaacagattataaattgagtcacttctcatttgttgatgatgtcttctttattaataaaatacctgaaggcttaacatttgatcatgcatttgagtgcgttggtgggcgtggtagccaatcagcaataaatcaaatgattgattatatttcaccagaaggaagcattgcactgttaggtgtaagtgagttcccagtagaagttaatacacgtctcgtattggaaaaaggactaacgttgattggtagtagtcgaagtggttcaaaagatttccaagatgttgtagacttatacattcaatacccagatattgtagataaattagcgttgttaaaaggtcaagaatttgaaattgcaacaattaatgatcttacagaagcttttgaagcagacctgtctacatcttggggtaaaacagtattaaaatggattatgtaaatagaaaaggatgaattaacgttggttaaaagtaagatatatatagataaaatctattgggagcgtgttcaattattcgttgaaggacatagtgaaaacctagatttagaagatagtaattttgtattaagaaatttaactgagacacgtacaatgaaagcgaatgatgtcaaaatagatgggaatcaattcgtttgtcgtttcaatgtagctatcttagataatggttattacttacctgaagataagtacttattagtgaatgagcaagaacttgattatattgcacagttaaacccagatgtgattaatgatgcatatcaaaatctaaagccagaacaagaagaagaatacaacgaattagaaacacaaaatggtaaaatcaatttcttattgcagacttacctaaaagaatttagaaaaggcggcatttcaaagaaaacggtttatactgttacacctgaaatttctagcgatgttaatgaatttgtccttgatgttgttgtaacgactccggaagttaaaagtatttatatcgttcgtaaatataaagaattacgtaagtatttccgcaaacaatcatttaatacaagacaatttatttttaaagcgatatttaatacgacgaaatttttccacttgaaaaaagggaatacggtgttgttcacatcagactctagaccaacgatgtctggaaactttgaatacatctataacgaaatgttacgtcaaaatttagataaaaagtatgatattcacactgtttttaaagcgaatattacagatagacgtggcatcatcgacaagtttagattgccatatttacttgggaaggcagactacatctttgttgatgactttcacccattgatttatacagtgcgttttagacgttctcaagaagttattcaagtatggcatgccgttggtgcctttaaaacagttggctttagtcgtactggtaaaaagggtggaccatttattgattcattaaatcatcgtagctatacaaaagcttatgtatcatctgaaaccgatattccattctacgctgaagcatttggtattaaagagaaaaatgtagtgcctacaggtgttccacgtactgatgtactatttgatgaagcttatgcgacacagatcaaacaagagatggaagatgaattaccaattattaaaggtaagaaagtcattcttttcgcaccaacatttagaggtagtggtcatggtacagcacattacccatttttcaaaattgatttcgaacgtttagcaagatattgcgaaaaaaataacgcggttgtattatttaaaatgcatccatttgtgaaaaatagacttaatattgcagacaaacataaacaatattttgttgacgtttctgactttagagaagttaatgatatactgttcataacagatttattaattagtgactattcatctttaatatatgaatatgcagtatttaaaaagccaatgattttctatgcatttgatttagaagattatattacgacgcgtgatttttatgagccatatgaatcatttgttccaggtaaaattgtgcaatcatttgacgcattaatggacgccttggacaatgaagattatgaaggagaaaaagtcattccattcttagataaacattttaaatatcaagatggtcgatcaagtgagcgtttagtcagaaatttatttggtagctaagtttatatagtagtcaaagtgggagaggtataatgatgaaattttcagtaatagttccaacatacaattcagaaaagtatataacagaattactcaatagccttgcgaaacaagattttccgaaaactgaatttgaagtggttgtagttgatgactgttcaacagatcaaacgttacaaatagttgaaaagtatcgcaataaattgaacttgaaagtaagtcaactcgaaacaaattctggtggtccaggtaaacctagaaatgtggcgttaaaacaagcagaaggtgaatttgtattatttgtggactccgatgactatataaacaaagagactttaaaggatgcagcagcatttattgatgaacatcactcagatgtcttattgattaaaatgaaaggtgttaatggtcgtggtgtaccacaatctatgtttaaagaaacagcacctgaagttactttgttaaattcaagaattatctatactttaagcccgactaaaatctatagaacagcattactaaaagataatgacatttattttccagaagaattaaagagtgcagaagatcaattatttacaatgaaagcatatttgaatgcaaatcgaatcagtgtgttaagtgataaagcgtattattatgctacaaagcgtgaaggtgaacatatgagtagtgcgtatgtttcacctgaagacttttacgaagtcatgagattgattgctgtagaaatattaaatgcagatttagaagaagcccataaagatcaaatcttagcagaatttttaaatcgtcattttagtttttctcgtacgaatggcttctcacttaaagttaaactagaagatcaaccacaatggattaatgctctaggagactttatacaagcagttccagaacgtgtagatgcattggtgatgagtaaattacgaccattgttgcactacgcgagagcgaaagatatagacaactatagaactgtagaagaaagttaccgtcaaggtcaatactaccgttttgatattgtagatggtaaattaaacattcaattcaatgaaggcgaaccatactttgaaggcattgatatcgctaagccaaaagtgaaaatgacagcatttaaatttgataatcataaaattgttacagagctaacgctaaatgaatttatgattggcgaaggacattatgatgtcagacttaaattacattcacgaaacaagaagcacacaatgtatgtacctttaagtgtcaatgcgaataaacaatatcgttttaacattatgttagaagatattaaagcgtatttacctaaagaaaaaatttgggatgttttcttagaagtccaaataggtacggaagtatttgaagtgcgtgttggtaatcaacgtaataaatatgcttatactgcagaaacaagtgcattaattcatttgaataatgatttttatagattaacaccgtatttcacaaaagactttaataacatttcgttatactttacagctattacattaacggattcaatctcaatgaagttaaaaggtaaaaacaaaatcattttaactggtctggatcgtggttatgtatttgaagaaggtatggctagtgtcgtgctaaaagacgacatggtgatgggaatgttaagccaaacatcagaaaacgaagttcaaatcttacttagcaaagatattaagaagcgagacttcaaaaatattgttaagttaaatactgcacatatcacttatccactaaataaataataaaacccctcaaatcattgtgaactaacatgatttgagggttttattttactgtttatgacatgattatgacatttcctcgtttatcattttcaaatacattaaattgtatacactggaaatgaggaggttatctataatgataaataaaaatgacatagtagcagatgtagtaactgattatccgaaagcagcggatatttttagaagtgtgggaatagatttttgttgcggcggacaagtaagtatagaagcagcatccttagaaaagaaaaatgtagatttgaacgaattattacagcgtctcaatgaagttgaacaaacgaatacaccaggttcgcttaatcctaaatttttaaatgtttcatcacttattcaatatattcaatcagcatatcatgaacctctaagagaagaatttaaaaatttaacaccttatgtgacgaagttatcgaaagtacatggacctaaccatccatatttagttgagttaaaagaaacatacgatacatttaaaaatggcatgttagagcatatgcaaaaagaagacgatgtcgattttccaaaactcattaaatatgagcaaggtgaggtagtagacgatattaatactgtgatagatgatttagtttcagaccacattgcaacgggacaattgttagtaaaaatgagcgaattaacatctagttatgaacctccgatagaagcgtgtggtacttggcgactcgtttatcagagattaaaagcacttgaagtgttaacacatgaacacgtacatttagagaatcacgtattatttaaaaaagtatcataactaaataacgcgattagaaactgttggcaaaaataagtccagcagtttttcgctatgtataaaagtcataatagtgacatgaacatcattatttgaaaagaaaaatgatcaatatagtataagaaatgatatgaaattttaatgctgtagataattaaatcgtagcgtgattttttaataatttattcatgaattttacatgcactattatgataaaataaacataattataattcactgaggtgctatcgtgctatcgctaacaatgttattacttgagcgtgtaggtttaattattattttggcctatgtgttgatgaatattccatattttaaaaacttaatgaatcgtcgacgtacatggaaagcacgttggcaattatgtattattttcagtttgtttgccttaatgtctaatttaactggtatcgtcatcgatcatcaacatagtttgtcaggaagtgtgtacttccgtttagatgatgatgtatctttagctaacacacgtgtattaacgataggtgtcgcaggattagttggtggcccttttgtaggtctatttgttggcgttatttcaggtattttcagagtgtatatgggtggggcggatgcacaagtttatcttatatcatctatatttatcggtataattgctggttattttggcttacaagctcaaagacgcaagcgttacccgagtattgcaaaaagtgccatgattggaattgttatggaaatgattcaaatgttgagcattttaacattttcccacgacaaagcatatgcggttgacctcatatcattaattgcactaccaatgattattgttaatagcgttggtacggcgatttttatgtctattatcatttcaacattaaagcaagaggagcaaatgaaggctgttcaaacacatgatgtactgcaattgatgaaccagacattgccgtattttaaagaaggattgaatagagaatcggcacagcaaattgcgatgattattaaaaatttaatgaaagtatctgccgtagcaattacaagcaaaaatgaaattttatcgcatgtaggtgcaggtagtgatcatcacataccaacaaatgaaatattaacaagtctgtctaaagatgtattgaaatcagggaagttgaaagaagttcatactaaagaagagattggttgtagtcatccgaattgcccgcttagagcagctatcgtgataccacttgagatgcatggttctatcgtcggtacattgaagatgtattttacaaaccctaatgatttaacttttgtggaacgtcaacttgcagaaggattggcaaatatttttagtagccaaattgaacttggtgaagccgaaacgcaaagtaagttattgaaagatgctgagattaagtcattacaggcacaagtgagtccacattttttcttcaattcaattaacacgatttcagctttagttagaataaatagcgaaaaggcacgagagttactattagaattgagttattttttcagagcgaatttacaaggctcaaagcaacatacgattactttagataaagagttaagtcaagtgcgtgcatacttatcactcgaacaagcacgttatccaggaagatttaatatcaatattaatgttgaagacaaatatcgcaatgtgcttgtaccaccatttttaattcaaattttagttgaaaatgctatcaaacatgcgtttacgaatcgaaagcaaggtaacgatattgacgtgtcagtgattaaagaaactgcaacacatgtacgtattattgtacaagataatggtcagggtatttctaaagataaaatgcatttgttgggagaaacatctgtagaatcagaatctggaactggtagtgctttagaaaatttaaacttacgcctaaaaggattatttggaaaatccgcagcattacaatttgaatcgacatcgagcggtaccactttttggtgtgtacttccttatgaaagacaagaggaggaataaatatgaaagcattaatcatagatgatgagccattagcacgtaatgaattaacatatttattaaatgaaattggtggttttgaagaaattaatgaggcagaaaatgtaaaagaaacattggaagcactactgataaatcaatatgacattatatttttagatgtcaatttaatggatgaaaatggtatcgaattaggagctaaaattcaaaagatgaaagagccacctgcgattatttttgcaactgcacatgaccaatacgcagtacaggcatttgaattaaatgcgacagactatattttgaaaccgtttggtcaaaaacgtattgaacaagcagtcaataaagttcgtgcgactaaagccaaagatgataatagcgcaaatgcaattgcgaatgatatgtcggcgaattttgatcaaagtttacctgttgaaattgacgataaaattcacatgttaaagcaacaaaatattattgggattggcacacataatggtattacaaccatacatacaacgaatcataaatacgaaacaacagagccattgaatcgttatgaaaaacgattgaatcccgcttatttcatacgtattcatcgttcatatattattaacacgaaacacattaaagaagtgcaacaatggtttaactacacttatatggtaatattgacaaatggtgtcaagatgcaagttggacgttcatttatgaaagattttaaagcgtcgataggattactttaacagtaatccttttttttatgcattttacctatgatattttgtatttcggactaaaattcacgcaaatcaaagtgagccatctatactttagttaaatcaaacgtaggaggcaatggtcgtgaaacaacaaaaagacgcatcaaaaccagcacacttttttcaccaagtcattgtaattgctttagtactctttgtatcgaaaataattgaatcatttatgccaattcctatgcctgcatcagtaatcggtttagtattattatttgtattattatgtactggtgctgttaagttaggcgaagtcgaaaaagtaggaacgacactaacaaataacattggcttactcttcgtaccagccggtatctcagttgttaactctttaggtgtcattagccaagcaccatttttaatcattggactaataatcgtctcaacaatactattacttatttgtactggctatgtcacacaaattattatgaaagttacttcgagatctaaaggtgacaaagtcacaaaaaagatcaaaatagaggaggcacaagctcatgattaaccacttagcactaaacacaccttacttcggaatactgttatccgttataccatttttcttagcaaccatattatttgaaaaaacaaatcgtttcttcttattcgcaccgctatttgtcagtatggtatttggtgtggccttcctctatttaacaggaattccgtataaaacttacaaaataggtggagacattatttacttcttcttagaaccagcaacaatctgttttgcgattccgttatataaaaagcgtgaagtgcttgttaaacattggcatcgtatcatcggaggtattggtatcggtacagttgtagcgttattaattattttaacttttgcgaagttagcacaatttgccaatgatgttattttatcaatgttacctcaagcagcaactacagcgattgcgttaccagtatcagctggtatcggtggtataaaagaattaacatcattagcagttattttaaatggtgtcattatttatgccctaggtaataaattcttgaagcttttccgaattactaaccctattgcccgaggattagcacttggaacaagtggtcacacattaggtgtagcaccagccaaagaattaggacctgtagaagaatcaatggcaagtatagctttagtgttagttggtgtagttgttgtagcagttgtgcctgtctttgtagcaatattcttctaaaacgaaaaacctaagcaagataatagcaatttgagccattgttattatcgtaaaaaaacgtctatactccggtttataactgggatatagacgtttttatgtatttattactttttactaggttttatggtatttaggcgttcgttttatgtattgcggcttttgaaaaatgatagaacgaattaatttaactaagaattaaaatgtaagttatatcatttgtgaaatttcaattaaatatttttcgacaaattcttgaaattacttaatgtcatcaacactttataaaaaaacggcgtatgcttatatgtaagaatgcaattaagaggagattttataaatgagtatgcaaagttcatataaacgtttagttaaagtgctactaacgattttagtgattgtgttttcaattttactagtaggtggttggtatatttttaaaaatgaagcacctcgtccaacaaagatagtagatcaacaaggtcatacgcttgttacaaaaggcgagctaatcagtgggcaagcgatatatgagaaatatgggttaacagattatggctcctacctgggcaatggttcctacttaggcccagattatacagcagaggcattacatcattacctgattggtatgcgtaaatattatgcacaagatatttatcataagcaacttcataaattaaatcatgcagagttagccgtagttaaagataaagtgatgaaagaaatacggattaatcgttattctgaaaaagaagatcaacttgtattaacgccaggacaagtatacggtctaaaatatttgcaagattattataaaaaagagtttgttaataaccctaaacaagtagggttaaatgaaaatatgattaaacagtttcaaaatgatgattatatggtcgcaggaaataaagttgaacatttaagtcaattctttttctggggtgcttggctatcatcaacagatagacctggaaaaacattttcatatacaaataattggccatacgatgtggatgcaggaaatacgttgcctagtgcaggaattttatggactgctatatctgtaacattactgattgcaggcttggcattcattatatatattcaaaagcgttatgaatttgacatgaagccgacgtatgagtcggaacgggaactaccaaagattgaagtagatagtaaaatcactgatagtcagcgaaaagttgggaaatatttagtcgttgtcatgttactatttttggttcaaatattattaggcgaattactggcacattattatgtagagaataaattttttggtatagaaatacaaaggctctttccatttaatattgcgaagacatggcatgtgcaattagttattttctgggttgctacgacttggttagcagcaggaatatacattgtacctaaagtattgggcaaagaaccaaagaaacaaggcgtattagtagatatcttgttttgggccttaatcatagttgtgatgggcagcatgattggagaatggggtcatattttaggttggattgattctcattggtggctattcgggcactttggttgggaatatatagaattaggtaaattttggcaaatattatttatagtaggtatggtcttatgggttatcattctttgtcgaggatttttaccagctattcgcaacaaagtacaagcgaatcatgataaacgtcacttattgacgctattgtttgttggagcaattgcaattccgttattttatcttgcatcattatttataatgccgaattcacatgtgacgtttgcagattactggcgatggtggattgttcacttatgggttgaaggtatatttgaagcatttgccgtagtgttgattggtttcttaatggttaatatgaaattaactaccattgaaacgacgattcgtgcattatattttcaattaatcctattactaggtacaggtattgttggtatgggtcatcattactattggcaaggtgatcattccatatggctagcactgggttcttgtttttcagcattagaagtcgtgccactttgtttattaatttgggaagcatacacacactatcgcttatataagaaaagtgacatcgcttttccttacaaaggtacatttatttttcttgcttcaacaggattgtggaatgcaattggtgctggagcattaggctttttaattaacacaccagcagttaactactttgaacatggtacgcaatggactgcagcacatgcccatggttctatggctggcgtgtatggtatgttctcaattgcaattgcgttgtatgtttttaaaaatattactaaaaaagaattttggacaccgaaagttgaaaaatggattaaaatatcatgttgggctttaaatgttggcttggcaggtatggtgttcattacattaatgccagtaggttatatccaacttaaagatgcattagaacatggttattggcattcaagactaacgtcattttatgaacaaccacttgtaaaagcaatcatgtggggtagaatgccttgggacattatattcacagtaggtgtcattatattagtagttatttttataaggggatacagacacttaaaaccaaaatacagagtatagatcatcttattactgagtgatcttagtgtgttttaacgtttgagacgaagagatattatacaataggattcaaactataagttcttagattatgtatatataaagaacagtaaaaagtaattttctgattgaaaatgtacttctcactgtttttaaagaaattatgtcctataaaacgtctatactccggtttataactggaatatagacgttttgatgtttgtattactttttactaggaatataaaactgtgcatgacgataatgaaatacgatgtcagatgaatcaaaaggtttgccagtcattgtataaaacgtttggtgataacgtaaacatggttcacctgcagataattgtagtaatgaagcttcacttgaagtgagttgatctacattaaagaaaatatctgaaaaaccaatacgaagtttcatgtttgattctaaataatcgaagatagagcccttagcaatatcatcatttaaatatttcacgatttctttatgataataagaatattcgatacataaaacatcatcgtccacgaatcttaatcgctctaaatagtagacggtatcatctgcatttaattggagctcatcttgtacagatttaggtggcgttgcaatctccttaaaaacaagtaccttacttgtcattcgatgttcgcctaaacttttagaaaaaccattggtcttaaaaacattgatacgatttgcatctgcaatatttctcacataaataccactgccttgtgcttgatagatcaaaccatcttgttccaataagcctaatgctttaatgatagtactcttacttacttgataacgttcttttaattgcgtcacgcttggcaatttatcaccgggtttgaaattagattgatgtataaacgcattaagttgcttagcaatatgttcatactttaacaatattctgtcctcgtttcactttgtctgtaattattatagcacaaaatattataattgtatcggcgtttacaaattgaaccggtacaattataattatgataagtcatatatttccattctattatcaagttgagggggtaatacttatgggcaataaatataaagattatgctcaagacatccttacagctgtggggggtgtcgaaaatattgttaatgtatcgtatgatacggtacgcatgaccattcatatgcatcatgcaattccttctactgctaatgaagtaacacaaatagatggcgtggcgtcagttgatgaaaatgaaacacagttagttatcgtatttaatgaagaagtaaaatatgtatatcaacaattacaattgttaatggacgacgccaagcatcaagaagatacgaatcatgatgctgtggatactcaagaaacagaacagaaagcgcaagcaaaagtgacaacaccaattttagtgaaagcaccaatcgctggtcgtcgtattttacttaaagaagtaagagattcaatttttagagagaaaatggtaggcgaaggcttggcaatcaaagctcatgaagaatccaaagtaatcgcaccgttcaatggtttagtatctatgattgtaccaactaagcatgcagttggtattcaatcagaagacggtgtggacatagtcattcatattggtgtgaatacagttgacttggaaggtaaaggattcgagtgctttgtaaagcaaaatgatcgtgttgaagcagggcaaacgttgttacaattcgaccagcaatatatacaacaacaaggctacaatgctgacgttattgtcgttattagcaattctgccgatttaggaaaagtagaactgacaatgaatgaaatcattacgactgaagatgttatttttaaaatatttaaaaactaggagtgtgttgtaataatgacaaaattaccgcaaaattttatgtggggtggcgctcttgccgccaatcaatttgaaggtggatatgataaaggtggtaaagggttaagtgtaattgatgttatgacgagtggtgcacatggtaaagcacgtcagattacagaatctatagatcccaatcactattatccaaatcatgaaggtattgatttttatcatcgttataaggaagatattgccttgtttaaagaaatgggattgaaatgtttacgtacgtcgattgcttggacacgtatctttccgaatggggatgaagatgtgccaaatgaagaaggacttgccttttatgatcgtatctttgatgaattaattgcacaaggtattgaacctgttgtgacgttatcacattttgagatgccacttcatttagcgaaacattatggtggatttagaaatagagaagttgtcaattattttgtgcattttgcgcgtgttgtatttgaaagatataaagataaagtgacatattggatgacgtttaatgaaataaataatcagatggacacatcaaatcctatctttttatggacgaattctggggtagcattgacagaaaatgataatcctgaagaagtcttgtatcaagtagcacatcatgaacttttagccagtgctttagcggttcgtcttggtaaagagattaatccgaaatttaagattggaacaatgatttcacatgtacccatttatccatattcgtgtcatccgaaagatatgatggaagcacaaattgcgaatcgcttacgtttctttttcccggatgttcaagtaagaggttattatccaagctatgctaaaaaaatgttggcacgaaaaggatatgattttggatggcaagaaggggacgacagtattttacagcagggcacggttgattatattggctttagttattacatgtctacggctgtaaaacatgatgttgatactacagttgaaaacaacatagtcaacggtggtttgaatcattctgtggagaatccgcatatcgcaacgagtgattggggttgggcgattgatccagatggcttaagatatacattgaatgtgttatatgatcgttatcagttgccactttttattgtggaaaatggttttggtgcagttgatgaagtggtagatggacatattcatgatgattatcgcattgaatatttaaaagcacatattacagcagcgatagaagcagttgatcaagatggtgtagatttaatcggttatacaccgtggggaatcattgatattgtttcatttacaactggtgaaatgaagaaacgctatggtttaatatatgttgatcgagataatgatggtcgtggcacgatggaacgcttgaaaaaagattcgttctattggtatcaacaagtgatagcatcaaatggagataaattataaaggtacattataagtattttagggttagagcccgagacataaattaatatggtaggccctaaagtgttatattggcgggcccccaacatagaagctggcggaaatacagcttacaataatgtgcgagttggcaggcccccaacacagagaaattggaacaccaatttcaacaggcaatgcaagttggcggggccccaacatagagaatttcgaaaagaaattctacaggcaatgcaagttggagaaggacagaaataaattttgcgaaaatatcatttttgtcctaatcccgtgatgttaaaattttaagaaaaaaataatgccactaactaagtatgtatagtgttaatgtttgagtatttataaaagtctttaaccaaaattgatgacctactaatcaacgataacgatattgttaagtagatgattagtgtcacaaagaaattaaagtaacagtcaaacatagatataaagtacagttagtggcattatatttagtgctcttttttagcgacaaaagtaatataattcatatctttacgcaatttagtcatcgttttaaacattttacaaaacattggtcgattttctttttttaaagcattgttgataatctttatagttccaacaataccttcgtcataaattaaaccttttggtgtcattaaactcattggaccagtatgataatgtacatgattaaaaccagcttgatgatataaatctaaccagccaagtttcgtctgcggtgagacattgacattaattgctgcagataatgatttaactacatgtgtggcatgtgattcattaacgatgacaatatcatgtgttaacaagatacccccaggctttaagactcggtagtactcgcgtaatgctttttcctttatggcgatgggtaacattgttaacattgcttcatttaaaacgatatcgaattgattgtcatcaaagggcaatttaacagcattcgcttgttgaacttgaatatatgattcaagacctgctgctgaaatattttcctgtgctttttctaatgctttcttatttatatcaacgccttgaatgtgacagccgtatgtatgagctagataaatagatgttgtgcacatattacatgccacttctaacacttgcttatcttgtgaaaatgccccttgttgtattaaccaatctgttgcttctttaccaccggggcgtagacgagtttttcctaatttagctaaaaatgtatgaccagcttctttggacataacataacctccttttaattgataattattatcattaatatagcatatttatatgcgataatttggaagttaacaagattacaaaaaattgtcacttcatttataactaaacatgagtcttcaagcataggtttagtggaaaattatttctaatagatgatgttttataaagataaaaaagcacagccatgatatacgaatgttgcatgttatatgctaaaccttcatatcatagctgtgtttgattcatttaaacttgatttacttcttctagtagaggaatagatgcttgcgcgccgtgtttttgtacagtgagtgagctcgctttattaccaaaatcaatagcatctgctaagttatcttgcgacttgtttaagcgactgacaaatgcaccaataaatgtgtcgcctgcagcagttgtatcaatcgcatttactttataagcttcgatgtgttggctttgatttttagtagcaaaatatgtaccttgcttacctagcgtaatcaaaacagtcttaatgcctaaagataaaaagtaattggcattgtctttcatagattgttcatttgttactttaatcccagataacaattcggcttctgtttcgtttggcacaataatatcgattaatgacaataattcattaggtaatgctttcgctggtgcaggatttaatacagtcgtcacaccatgtgccttggcaatttcaaatgcagatataatagccgggatgggtacttctaattgtgcaacgacaaagtctgcattgattatagcgtcttttgcgttaataacatcttcaggtgtcatcgtcatattcgcaccaccataaacatagatggtgttttgtccttctgcattcacagtgataaaggcttggcccgtttttgcttcagctgttttgataatatatgacgtatcaatatgagccgctttaaaatcttctaagatgaaatcagcaacgccatcagtgccaattttagtaataaatgttgtgtctgcttgcatgcgtgcagtggcaatagcctggttggcacctttacctccgccgaatgctttttgtgcttcttcaacatgtaatgtttcgcctggttgtgcatatctttcaactgttaaaaattgatcgacattcgttgaacctaaaataacaactttgttggtcatgtgtatgctcctttcaagttataatttttaaaaagtaacattcgattctaatgcaatattagagtagggcgttgtctcaccagtacgaatattacctttatttaatgggtgagctaagttacttttcatttcttcgtgaggaatgaaaatgatttcgatttccgatgaaatcaattgtttaatttgttgcaattgtgtagggttatgttcttttatttcttctgctaagtatattttttggatttccatttcttctaacactgtagctaagacatcaataaagcgcggtaagttttttgtgacagctaggtcgatacgacgatgatcatttggaattggcatgccagcgtcattaattgttaatagatcaaaatgaccaattgtcgcgattgcttttgaaatatgttcatttaaaacagctgattttttcatgacatctacactccttattttataaatactgtaacagaagcggctactaaaatgagtactaagccgatgattgtaataaccatttcttttgacgttttatgttgttttaagaaataaataccagttaatgtagcaagcacaacggatgtttgagaaagaataaatccagttgctaaaccattcatattaggttgtgctgaaataagatatgttaaggcaccaaatgcaaagaagaaacctgaaataatttgtaaccacgtaattttattacggaatggattctctgctttcatattcataaagccataaatgactgcaacaattaccatacccattgcttgaggtaaaaaggcagttaggccatcaatagaagttgcttgcggtgcagctgaatataaccagtatccaaattcaccaattaacagaagtaccactgcacgacgtaaatttttggcgttacttgcttctttgcgttcactccaaactgtcatacgcgcaccaattagaataacgactaaagctgtaaatccaatgattttatgaccaatgcctggccaatttcctaatgcaaagacaccccataaagatgcgcctaataattggaatgctgttgtgactggcatggcacgagatgagccgactaattcgaacgctttaaatgtaatgatttgtccgaatccccatcctgcacctgataataaggcgaatagcaaattggttccagtaggaaagccacttgatgtgactacggctaatataatagcgaagattaacgtacctacagtagcaccgataatttgatgtacaggtttaccaccaaactttgaagcgactgttgggaagaagccccagccaattaaggggcctaacccgataagtaatgcaacaatgctcatgttatacacctcacgatttgtttttagtaaaacgttttaccagtgccatcgtaccatttttatttgtaaaatgcatgcgttttcataaaagctgaaaacgcttaaatcatatttgaaaattcatacattattattttaatttcatagtgaaataattatgattaaaaaccctcagcattaaagcaacgctaagggcctaacaatgatgagtatatttcggaagatacgtagttagtttgaaagatgatagccagttgttgcacgaatttttaaagtcgttggtaattcaatcatatcaatggatttatctaagtgctgtaatcgttgaagtaataaggttaaagatgttttgccaatatcagttataggttgtgccacagtagttaaaggtggcgagacgtacgctgcataatcaatgtcgtcataacctattaatgagatatctttcgggatactgatgccatgttcaattagtcctcgtaaaatgccaatagcgagttcatcgttaatagcgaagattgcagtggcagattgaaccatgatgtcatcaacaatggttagcccaccacgcttagataattcagtatggacgatttgtggttctggcaattgattcgcgcgcaaagtatcaacaaatccagcgacacgagtcgacatattcgccatcatgtcatatggtgcaacaatcatcatattgttgtgaccgagttctattaaatgttgtgctgcaagttgtccgccttgatattcatttgtccgaacaaaatctgtatagccttgatggtcattttgatccagtacgacataaggtacatgatgtttctttagatagttatttagggcgtccggggatgaaatgtattgtgcgataattaatccgtcaatacctcgatcaattaaatgtttaatattgtcatacaaatcagttgctgtagatgttaaaaagcataaatcaacatcagatggtttatggtcatgaatactttgcatcagtgctgagaaaaacggatttgttaagctaggtaaaatgacgccaatagtttgaattttactgccgcgcaattgttttgcatgtttgttaggggcgtagcctaaacgttctgaaacagcatgtacgttttttatcgttgttgcggaaaaacgactatcattatgatttaaaatatgtgacacagttgtgactgatacaccagcttctctagcaacatctttaattgacacttttttcatattatattccttctctttattgtgtaattaatcatacagttatatacccgattattatattcatcatatcatgataaacatttgatgacatatgaagacgtgaatgacttttattgtctacaaacagacgcctatagtatgcgattaaggttgaggcgagagaatatattattaaggttaataccttttaatggttatgataactagaattttaaaatgtttattgtgatgaaaaatacaaaagtcattattttgaagaataaaatatttgtttttgaaaaaagtattaaaaaacataacaaaatgatgtatattgaactatgtgattgaaaaaatttttaattaaggcttgttaaaacttaagagaggatgtttttaaatgcaattcaaattaaaagaagaagagattattagttttttagaattgaaatatccagaaaaagagttcgaatatggtcgtttgttagttggacaacataaacgcgatgatttagatgtttattactttggcgatacgtttttaatgtgcacgattatttcattcaagacatttgaaattaaagaaacagtagaattatcatatgatgctgttaatcgtattgtgttaaaagatggatggttatttagaaaaatgagaatagaaacaatgcaaaaagtgttaaaatacggtacatctaaattaatgttaactgattttcaaaaggacaattataataaatatattcaaggtcagaaacaacgcgtgatatttgaaaatggccattttgtctaattgatagtgaataataattagaataagcgaagaacaatgaaaaatgttcttcgcttatttttatagaatttgatgtatatcattttaaagtgataaagatatttcgaaacataattcttctattatatttaagatttaactgtttttggaatgatcatgtatgcagacaatgagccgagtatcattaatacaatgctgacgatgaatgttacagttgcagctacacttggtgcatagtttagttgtaacatactgaaaactgtagtacttagtgctataccaaaggcgccacctaatgtaccactcattttatataatcctgtagctaaaccaactttttcatttggcatactgaaaattgcaattgtaaggccgggtgttgcgactaaaccatttccaattgcgcaaatgacaaacccaataacaacagcaatgatatattgtgatggttgaagtgatgtcatgctaataatagtgatgccgatgacagggaacaacggaccaatgatgagcatcaatttgccaccgaaacgtaatgttgctttttcacctaaacgaatcatcgcaactgccacaatggcatatggcaatgtaacaagtccagattgcgcagctgataaaccaaggtgtgtttgagcatatatgaaaaagaccactgttacgcctagaccgctatttaaaacaaagttatttaaaaatgcaccaatgaacggacggttgcgtaatactgagaaatcaataaaaggtacttcatgtcgacgttcgatgatgatgaatatcagcgtagtgatgataaaaatgctcagacaaatgaatgaaaatgtactaaaccaaccttgttcgaatccttgtgttaacaataatgtaaagctaccaatcataacagcgaaaatcgacatacctttgtaatcgaatggatgacggtggctatgttgacttactttttcaggtgtgccttttagaagtaatatggcaatgaaagcaatgcctatactaatgatgaaattcgtttgccatccgaaatttgtggcaattaaaccgccgataacaccagctaggccaatgcccccaacagtactaatcattagataactaatcgctcgtcttaaatgttctcctttaaattgattatttaaaacgccaactgttgaaggtaacaagatagctgctgatagaccttgtaaaattctaccgatgatgagcagtgcagtgatgtccgatataattaatagaagagatgcaaacatactgattatgagacccatgtatgtcattctcagttgtcctattttatcagcaatatcacctgcagctaccatgaagatacctgtggcgaaggaagttaaactaatagataaatttaacacggcaggagaggtttgatacgtttgaccaacgagaggtcctatattaataaatgattgtgcaaacaaccaatatgttaatgcagacaacataatcgcaataataatattactgcgtggtgaagattgtgtgttattcacagatgtcactccttgtaaaaattaaatatagaaagtcatgagatgaggtgaacggatgtatagatgatcgttcactcacacataagtcatgatttccttacatatcataccacagttattgagaatgaatatcaattaattgcttgtatgattgattttttataatatgtttaagtgaaacagctttatttgaaagtgattaaagtaaatgaaggtacagaggagtgagaacaatgtgcacaggattcacaatacaaactttaaataatcaagtacttcttggacgcacgatggattatgattatccattagatggttcgccagcagtgacgcctagaaattatcgttggacatctcgcactggcacgacaggccaaacccaatatggctttattggcacaggaacagatatggaaggttttatttatggtgatggtgttaatgaacatggcgttgccatttcaacacaatatttccgaggttatagttcatatggatcaacacacaaagcggacgcgatgaatattacgcaaaatgaaattgtgacatggattttgggatatacaacaagcattgaagatatgaaacaacaagcatcccaaatacatgttgtagcggtatatttaaatgatatcggtgaagttccgccattgcattatcatgtttccgatgtaactggacattcagccgaagtttcatttaaagagggtgaagtggttataaaagataaccctattggtgtcttaacaaatcatccagacttagattggcattatagtaatttaagacaatatatcaatatttctccttatccagcaacagcaaagttattggaaggtgtatcgattgaacctttaggcaatgaagcaggtacatttggattgccaggtggatttacttcaactgagcgctttgtgagaatggcatttatgaaagcaaacattgctcaaaacaatgataaagaaatggatttaatgaatgcattttatttattagatgcggtaaatataccgattggaattgtacgtccgcatgatgctgacaatcactatacgatgtatcagaccgtaataaatttaactacaagaacgttatatattaagtattatggcagcaatgaaatagtagcattaaagctcacagatgatctaattaatagaaaagatatgatgatttttaagcctgagaagcatatcactattagaaagttgaatgacaatcaatagcgattgaaaatggaatttggttgatatgatttgatggatgattactatcatacattagcgttgaaccgcgaacatggacgaatgattagttgttaattttgaaaatttataaaagcttaagcgaacgcagtgagagatgtcattttaatatcaatgtatggctattttgtaatgacaatgtaatgagtttagtaaaacatttcgggaatattaaatagttggaaaatgagaattaaatcctttactcagttgtctaattcttttagtatgtgcagtacagtttaattgaaaactaactttaactttaatggaggatgttttatacatgaaaaaattaacagcagcagcgattgcaacgatgggcttcgctacatttacaatggcgcatcaagcagatgcagcagaaacgacaaacacccaacaagcacatacacaaatgtcaacacaatcacaagacgtatcttatggtacttattatacaattgattctaatggggattatcatcacacacctgatggtaactggaatcaagcaatgtttgataataaagaatatagctatacattcgtagatgcacaaggacataagcattatttttataactgttatccaaaaaatgcaaatgccaatggaagcggtcaaacatatgtgaatcaagcaacagcaggagataacaatgactacacagcgagtcaaagccaacagcatattaatcaatatggttatcaatcaaatgtaggtccagacgcgagctattattcacatagtaacaacaaccaagcgtataacagtcataatggtaatggaaaggtcaattaccctaatggcacatctaatcaaaatggcggatcagcaagtaaagcgacagctagtggtcatgcgaaagacgcaagctggttaacaagtcgtaaacaactacaaccatatggacaatatcacggtggtggtgcgcattacggtgtcgactatgcaatgcctgaaaattcaccagtttactcattaactgatggtacagtagtacaagcaggttggagtaactatggtggcggtaatcaagtaacgattaaagaagcgaacagtaataactaccaatggtatatgcataataatcgtttaactgtttcagctggtgataaagtcaaagctggtgaccaaattgcatattcaggtagtacgggtaattcaacagcacctcacgtacacttccaacgtatgtctggtggcatcggtaatcaatatgcagtagacccaacgtcatacttacaaagtagataatacagtaaatcccaagttacgatatcatacgcaacttgggattttttcgttttaataataggtataagcccattgcttgtcctctaaaacatgttgataaaaaggatcttggccaattaacttgatatcatctgcaagtgcttcaacttcatctaaatgatgggtagttaatataattaaacatttagatttcataatgttaagtagttggtggatgtcatgtctagattttaaatcaataccaactgtcggttcatctaaaataagaattcgaggttgacctagtaaacctactaatatattaattttacgtttattcccaccggacaatgtagatactttggcagacgtatcatcaaagtttaattgctgtaaatattcgttgatagttgtatcgttaattggatttttacaaagtgatttaaaaaatttaatgttttcagccactgtcatgtgctcaaataacgcaatgtcttgtggcacataaccgatgtgattttgtatttgtctttgattccatttttcgccgaaatagttgatagttccatcattagctttttcaataccagcaatcatacgaagtaatgttgattttccagcgccattatcaccaagtaatacggttaaacgattactttcaaaggacatggttaaatgattgaaaatctgtttgttgcggtaacgctttgaaaggttattaatttctatcatcagttacgctcctttacatgaaaatgctcaagtatacgatacccatagcaagtgcatatataaatgtcatgaataatcgatgacttattgtttgaatatggaataagataaagacgatacctatctcataaatcaatataagtagcagtgattttaagtaaaatattaagctgagtggttgagacaaatatagactaactgccaatagtaccaacaataacaaaatagtatgtgtcattacataagtactatatagtttgaaacggcttaaatgatattgtgataatcgttgcaatgctgcttgttggtttaaacgataatgaagtattacttgaacagcgctaacaaataaaatcaccgcaaagattaagctaattgaaatagagtgttgtgcttgtttagtaagcgacacaaatttgattttagattcaggtatatgtttatgataggacttgttgatagcatcgatggattgatgctgtttcatatcctcaaggtgttcataaataatgttaggaatttgctgttcatataatgagctactgacaatttctacagcaataccacctataaagtcatctctaccatataactgtatcgtttctttcaaacggttctcttttaatttttgagagaaacctttaggaatttgcatacttaaaatagcttcctttttagtaacatcatcttcaatatagctttcatcttcatcgacttttttaatagttacatagtcagattgtttaattttattgacgaatgattttgatgcagtggtttggtctaaatcttgaatggtaatcggtattttgaagttgtcatgtgctacacggtaacccataccaataagtacgagtgcgatgacaatggttgttacgagcaagatgtattgtaaccattgcttgaacacaacaagttgtatataaggcttcattgacgatacctccaaaccaatacagctaaattaattatcaaaagtgcgatgaagctaagatagaaactagggtgcagttctaaaatgtagttgtttaaaataatttctaacaattgatttgttacaactgcgaacggttgaatattgaaaacgccatttgctatatgttgtaaaaaaatcgtaggtattgttaaaccagataacaccaggatgacaatagctaatatgactttactaatactattcaacaagcctgttgttaaaagttcgatgattaataaccacagtattaaaaaggtaacataatagcttaaatgaatggctaacgttggccaattatataattcaaaggtattcggaatactgaacacaatccaaactacaccaacgatactccataacatagtataaaaccatgttatcaacgcacgaatgattaataaacgctctttagaaaaatgaaacattttcaatcgcgctttcaatacagtatcttgattcattttcaaaactgtaaataaagatagtgcaaagatgaataccgttgttaaaaatcctgtaattgcataataactgcccgtatcgtataaatgaatcggttctaagttaaatgcacctgaacggtttaatcctgtaatcagcaaatcagtcataacattgatactgtcagaatgtgatgctttcggtgctaggtcttgaaaagctaagatgccacccattgaccgcataaggcgttggtaaacagaatctgttagctgagatagcacgacacttttcatggattgttgatcatatgtatatactgaaattggtagttcaccttgtttataaaatgccttggtcatacctttatcaaaaacaaaatagccttgaagtttctgctgttttagcaaagtatgtgcttgcttatcatcatatgctttaatgctcacatttttacctaggttactccctttaccaatagagtttaagattaatttcgtttcacttgattggtctttatctacgacacctatattaaaatgattgtcatcttctgttacatgttggattgtcgttaatgtaataaggagtgccgctaatataaatagtaaatagataatcaaataccactttttcaataaaaaagagtggtagatgcgaaacaaatgtattgttttcatttaaccactcctccaatgataagattgaaaggcaagatgaccttccaatcttatttttatattttagttatttagatgccttttttaaaattgattcaaacattttgccgccatttttttcgatttctttttcaagtttttcacggtcttttgaagatagactattgaaatctttcgcaccactatcatcaaaatcaatatctgctttcaattttgtgctagattttaaaatgaaattaattggttcttcagcatatttgatgccgatatttaacgtagatttctgagtgttattttttacgtcagaatctatattattttcaaaagtgaattcattttcgtcgctatatttatctaacgcgacagtgattttacctttatcttgacgttttgtgccatctactttttcttggttatctaatttgatttttgattcatcatattctgtctttttaccaaattcgtatttatcactgtatttattgtctttttccttagaagatacgcctttaattgtatatttcgcttcagcatacgtgtatttatcttgatcgaaatcaagtgcgtaatctagttttaacttatcgtcttctaaagtattagtacctttgattttagttttattattttctttgtctgtaatagtaatttctcgttttacaatcgtatgtttttcggtataaattttagattgaattttagcaaattcatcctttttagtttctttgacatcgtcaattgcttttttaatgtctttttcaaagtcttttgtagtaccttgttcttccattaattttttaaggtctttatcctttttagcttcttctaatacagctaatgtaatttttttagtgtcagctctgctaagtgttaacgtgacaggtctaactttgtacttttcaccattaaccttaatttcttcttttttacctttatcaaaattatcgtcatctaatttgtcgacaataagttcggaatatttttcggcaattttgctgtagtcactttgttgtgcttgagcattactgaaaagagtatttaaatttagttgttggtttgtaataccattttcttttgctgtttcttcatcttcacctgtaagttttgaataagttgataataaatcagaattattaacactatatttccctttaaataatggtgattcgaaataatgcttatctttatctgcagctaactggaatttccctaatgcagagtctgctattgttggttcaagattaatcattgatttctcttttttaggatcatgtccatatgacattttaattttcgaagcattaacaacagatttaggaataccaagccctttaacaatttcatcagatgcatctgcgcttaattctaatgaagataaaaatgaattatctttcatcttttcttggaacttcacttcgttttcaaaacggtcattaaaataatctttatacatttttgcagtttgttgttcactttttaagtatgtatttttcggtgtgtttgcaaaaaatgcataaactccccatgcgattccacctattaataataagacaataataataggaattataatttttaactttttagacattttgcttcctcccaattatttatgagttaatcatatcagaacaatacattttattaaatggtttattttaaattttgtttaaattaatagaattttagttataataatgtttaataagttattgaaaatctaataaactacaaaaaatagtttgattacataatgattcttgaaaatgtcggttaactttaaggtgacaagttattgcaattttgaaggtagacatcatattttataatcgaataacatacaaaataaagcgaccaattttgcagtgttacgaattgtaaactgcgaactggtcgctttttattgatgtcatgattaatttaatggatgtaattatatgatgaaatttctgaagcagagatggttcttgatgaaacgatatattcaccaatccagttcatttctgaaattagaatacttccatcaatattaactttctcaacgtaggctacatggccaaatggaccgtttactgtttgtaaaattgatcctcgtgttgggtgtctatctactttgaagccattgcttgaagcttggcctgcccagtttttagcatctccccaaaatgtactaatcgtgtgtccatctttggcacgtttatcaaagacataccatgtacattgtccagcagtatataagttgttcttacttgtgataagaggctgatcaatgattttaccgttacctaaagctaaaggtttaccgtcagcagtctttgctttgtcattaaattcggcgatttgtaattcgtcatacaattcgtctaaatcgatgcctgtaataagccctttgttatcttttgaaaaagcgttatttaattcatcgtcattgtcttcaacattcggtattgctggtgtcaaaggattgcttggtgacgtttgaggcggtgtgtgtgaatcaattgcgtcattaatgtgcgtatactgaccacttaatgaagaatggtactgattgttgttaagatcacgttgatttgcgtgttgatgattgtcgtttgtacgtgactgattttgatgattgttgtttggcgcgttgcttttgtcataagtataagtatacgcgccggtgtctttattcactttgaactgtgcgtttgggtgtgctttctttgcttcttctaatgttttgctatcattcgtgtatgcttgagccgagttaggcgacatactaaataaagtaagagttgtcatcgtcagtaaaattgttttcttcataataaccatttaatcctttatgtatttaatttaattttagtatacacatttatattacaaaaatgaatggttaattaaaaatatatgggtatattcaatatatttatttaaaaaaagctaaaaatacttaaaaaactatatacatatactaataatttatatattatttgagtaaggagcactttttcaaaaaatagtgtccctaaaaagttttgataaacttaaaatattcaggaggtttctagttatggcaatgattaagatgagtccagaggaaatcagagcaaaatcgcaatcttacgggcaaggttcagaccaaatccgtcaaattttatctgatttaacacgtgcacaaggtgaaattgcagcgaactgggaaggtcaagctttcagccgtttcgaagagcaattccaacaacttagtcctaaagtagaaaaatttgcacaattattagaagaaattaaacaacaattgaatagcactgctgatgccgttcaagagcaagaccaacaactttctaataatttcggtttgcaataagcattctgaaattggcaaagtcacattttctaatgtggctttgcttatcattttttaagaaaacaactgaaaggaaataagcatgaaaaagaaaaattggatttatgcattaattgtcactttaattattataattgccatagttagtatgatattttttgttcaaacaaaatatggagatcaatcagaaaaaggatcccaaagtgtaagtaataaaaataataaaatacatatcgcaattgttaacgaggatcaaccaacgacatataacggtaaaaaggttgagctgggtcaagcatttattaaaaggttagcaaatgagaaaaactataaatttgaaacagtaacaagaaacgttgctgagtctggtttgaaaaatggcggataccaagtcatgattgttatcccagaaaacttttcaaaattggcaatgcaattagacgctaaaacaccatcgaaaatatcactacagtataaaacagctgtaggacaaaaagaagaagtagctaaaaacacagaaaaagttgtaagtaatgtacttaacgactttaacaaaaacttggtcgaaatttatttaacaagcatcattgataatttacataatgcacaaaaaaatgttggcgctattatgacgcgtgaacatggtgtgaatagtaaattctcgaattacttattaaatccaattaacgacttcccggaattatttacagatacgcttgtaaattcgatttctgcaaacaaagatattacaaaatggttccaaacatacaataaatcattactgagtgcgaattcagatacattcagagtgaacacagattataatgtttcgactttaattgaaaaacaaaattcattatttgacgaacacaatacagcgatggataaaatgttacaagattataaatcgcaaaaagatagcgtggaacttgataactatatcaatgcattaaaacagatggacagccaaattgatcaacaatcaagtatgcaagatacaggtaaagaagaatataaacaaactgttaaagaaaacttagataaattaagagaaatcattcaatcacaagagtcaccattttcaaaaggtatgattgaagactatcgtaagcaattaacagaatcactccaagatgagcttgcaaacaacaaagacttacaagatgcgctaaatagcattaaaatgaacaatgctcaattcgctgaaaacttagagaaacaacttcatgatgatattgtcaaagaacctgattcagatacaacatttatctataacatgtctaaacaagactttatagctgcaggtttaaatgaggatgaagctaataaatacgaagcaattgtcaaagaagcaaaacgttataaaaacgaatataatttgaaaaaaccgttagcagaacacattaatttaacagattacgataaccaagttgcgcaagacacaagtagtttgattaatgatggtgtgaaagtgcaacgtactgaaacgattaaaagtaatgatattaatcaattaactgttgcaacagatcctcattttaattttgaaggcgacattaaaattaatggtaaaaaatatgacattaaggatcaaagtgttcaactcgatacatctaacaaggaatataaagttgaagtcaatggcgttgctaaattgaaaaaggatgctgagaaagatttcttaaaagataaaacaatgcatttacaattgttatttggacaagcaaatcgtcaagatgaaccaaatgataagaaagcaacgagtgttgtggatgtaacattgaatcataaccttgatggtcgcttatcgaaagatgcattaagccagcaattgagtgcattatctaggtttgatgcgcattataaaatgtacacagatacaaaaggcagagaagataaaccattcgacaacaaacgtttaattgatatgatggttgaccaagttatcaatgacatggaaagtttcaaagacgataaagtagctgtgttacatcaaattgattcaatggaagaaaactcagacaaactgattgatgacattttaaataacaaaaagaatacaacaaaaaataaagaagatatttctaagctgattgatcagttagaaaacgttaaaaagacttttgctgaagagccacaagaaccaaaaattgataaaggcaaaaatgatgaatttaatacgatgtcttcaaatttagataaagaaattagtagaatttctgagaaaagtacgcaattgctatcagatacacaagaatcaaaaacaattgcagattcagttagtggacaattaaatcaattagataataatgtgaataaactacatgcgacaggtcgagcattaggcgtaagagcgaatgatttgaaccgtcaaatggctaaaaacgataaagataatgagttattcgctaaagagtttaaaaaagtattacaaaattctaaagatggcgacagacaaaaccaagcattaaaagcatttatgagtaatccggttcaaaagaaaaacttagaaaatgttttagctaataatggtaatacagacgtgatttcaccgacattattcgtattattgatgtatttactatcaatgattacagcatatattttctatagctatgaacgtgctaaaggacaaatgaatttcatcaaagatgattatagtagtaaaaacaatctttggaataatgcgattacgtctggtgttattggtgcaactggtttagtagaaggattaattgtcggtttaattgcaatgaataagttccatgtattagctggctatagagcgaaattcatcttaatggtgattttaactatgatggtcttcgtacttattaatacgtatttactaagacaggtaaaatctatcggtatgttcttaatgattgctgcattgggtctatactttgtagctatgaataatttgaaagcggctggacaaggtgtgactaataaaatttcaccattatcttatatcgataacatgttcttcaattatttaaatgcagagcatcctataggcttggcgctagtaatattaacagtacttgtgattattggctttgtactgaacatgtttataaaacactttaagaaagagagattaatctaatgttgatgaatagcgtgattgctttaacttttttaacagcatctagcaataatggcggacttaatattgacgtgcaacaagaagaggaaaagcgaatcaataatgatttaaatcaatatgatacaacgctatttaataaagacagcaaagcggttaatgatgcgattgttaagcagaaaaaagaacgacaacaacaaataaaaaatgatatgtttcaaaatcaagcgagtcactcgactcgcttgaatgaaactaaaaaagtgttattttccaaatctaacttagaaaagacttcggagagtgataaaagcccctatattcaaaacaagcaggagaaaaaaatattcccgtacattttgatgtctgtaggggcttttttgactttaggatttgtcattttttcaattcataaagggagacgaacgaaaaatgaatcagcacgtaaaagtaacatttgattttactaattataattacggcacatatgacttagcagtaccagcatatttaccgataaaaaatttaatagctttagtattggatagtttggacatttcaatatttgatgtcaatacacaaattaaagtgatgacgaaaggtcaattacttgttgaaaacgaccgacttattgattatcaaatcgctgatggagatattttgaagttactataggaggaaaaatagatggttaaaaatcatgaccctaaaaatgaaatgcaagatatgttaacacctttagatgctgaagaagcagctaaaacaaaattacgcttagatatgagagagattcctaagtcttcaattaaaccagaacattttcatttaatgtacttattagaacaacattctccatattttatagatgctgaattaactgaactacgtgatagtttccaaatacattatgacattaatgacaatcatacaccttttgataatattaaatcatttactaaaaatgaaaaattacgttacttactcaatatcaaaaatttagaagaagtaaatcgtacacgttacacatttgtgttggcaccagatgaattatttttcacaagagatggattaccaattgctaaaacaagaggtttacaaaatgttgttgatccattaccggtgtcagaagctgaatttttaacaagatataaagcactggttatctgtgcattcaatgagaaacaatcatttgatgctttagttgaaggaaacttagaactacataaaggaacgccatttgaaactaaagttattgaagcggcaacgttagatttactaacggcatttttagatgaacagtatcagaaacaagaacaagattatagtcaaaattatgcatatgtacgcaaagtaggacataccgttttcaaatgggttgctatcggtatgacaacgttaagtgttttattaattgcatttttagcctttttatatttttcagtaatgaagcataatgagcgtattgaaaaaggataccaagcatttgtaaaggaagattatacgcaagtactaaatacgtatgatgatttagatggtaaaaaattagataaagaagcactttacatttatgccaaaagttatatccaaacaaataaacaaggtttagaaaaagataagaaagaaaatttacttaataacgtgacaccaaattcaaacaaagactacttattatattggatggaattaggacaaggacatcttgatgaagcgattaatattgccacttatttagatgataacgatattacaaagttagcgttgattaataagttaaatgagattaaaaataacggagatttatcgaatgataaacgttctgaagaaacgaaaaagtataacgataaattgcaagatattttagacaaagaaaaacaagttaaagatgaaaaagcgaaatctgaagaagagaaagcaaaagcgaaagatgagaaattaaagcaacaagaagagaacgaaaagaaacaaaaagaacaagcacaaaaagataaagaaaaacgccaagaagctgaaagaaaaaaaatagtataggactgaggcaaagacaatgcataaattgattataaaatataacaaacaattgaagatgctcaatttgcgagatggtaagacatatactattagcgaagacgagcgtgcagatattacgttgaaatcgttaggcgaagtcattcatttagaacaaaataatcaaggtacttggcaagcgaatcatacttctattaataaggtgcttgttagaaaaggtgaccttgatgacattacattacagctttatacagaagctgattatgcatcatttgcgtacccttcgattcaagatacgatgacgattggatcaaatgcatatgatgacatggtcattcaaagtttgatgaatgccatcattattaaagattttcaatcgatacaagaaactcaatatgtgcgcatcgtgcacgataaaaatacagatgtgtatattaactatgaactacaagagcaattaacgaacaaagcttacattggtgatcatatttatgttgaagggatatggctcgaagtacaagctgatggtttaaatgtattgagtcagaatacagtggcatcgtcattaattcgcttaacacaagagatgccacatgcacaggcagatgattacaatacgtaccatcgttcgccaaggattattcaccgtgaaccgaccgatgatattaagattgaaagaccaccacaaccaatacagaagaacaatacagtgatatggcgttccattataccgccattagtaattattgctttaactgttgtcatctttttagtgagaccaattggtatttatattttaatgatgattggtatgagtacagtaacgatagtatttggtattacaacgtatttctctgaaaagaaaaagtataacaaagatgttgaaaaacgagagaaagattacaaagcttatttggataataaatctaaagagattaataaagcgattaaagcacaacgttttagtttgaattatcattatccaacggttgctgaaattaaagatatcgttgaaacgaaagcaccaagaatatatgaaaaaacatcgcatcatcacgatttcttacattataagttaggtattgcgaatgtagaaaagtcattcaaattagattaccaagaagaagaatttaaccaacgtcgtgatgaactattcgacgatgctaaagaattgtatgaattttacacagatgtagaacaagcaccattaatcaatgatttaaatcatggaccaattgcatatattggtgcacgacatctcattttagaagaattggagaaaatgctaatccaattgtcaacgttccatagttatcatgatttagagtttctatttgtgacacgtgaagatgaagttgaaacattgaaatgggcacgttggttgccacatatgacattgagaggtcaaaacattagagggtttgtttacaatcaacgaacacgtgaccaaattttaacgtcaatttatagcatgattaaagaacgtatccaagctgtgcgtgaacgcagcagaagtaatgagcaaattattttcacaccgcaattagtgtttgtcattacagatatgtcattaattattgatcatgtcattttagaatatgtaaaccaagatttatcagaatatggtatttcattaatctttgttgaagatgtgattgaaagtttgccagagcatgtagataccattattgatatcaagtctcgtactgaaggcgaactgattacgaaagaaaaagaattagttcaattgaaatttacacctgaaaatattgataacgttgataaagaatatatcgcgagacgtttggcgaatttgatacacgtcgaacatttgaaaaatgcaattcctgatagtattacatttttagagatgtataacgtgaaagaagtagatcagcttgatgtggttaatcgatggagacaaaacgaaacatacaaaacgatggcagtacctttaggtgtaagaggtaaagatgacattttatcattgaacttacatgaaaaagcacacgggccacatggtttagttgctggtaccactggttcagggaaatctgagattattcaatcatacattttatctttagctattaattttcaccctcatgaagttgcattcctattgattgactataaaggtgggggtatggcgaacttatttaaagatttagtccatttagttggtacgattacaaacttagatggcgatgaagcgatgcgtgccttaacatcaatcaaagccgaattgagaaaacgtcaacgtttattcggagagcatgatgttaaccatattaatcaataccataagttatttaaagaaggtgttgcgacagaaccaatgccacatttattcattatttccgatgagtttgcagaattaaaatcagaacaacctgattttatgaaagaacttgtatcaacggcacgtattggacgttcgttaggtattcatttaatacttgcgacacaaaaaccatcgggtgttgttgatgaccaaatttggtctaactctaaatttaaattggcattaaaagtacaagatagacaagacagtaatgaaattttaaaaacaccagatgcagcagacattacattaccaggtcgtgcgtatttacaagttggtaataatgaaatttatgaattattccaatctgcatggagtggtgcaacatatgacattgaaggcgataaattagaagttgaagataagacgatttacatgattaatgactatggtcaacttcaagcaatcaacaaagacttgagtggacttgaagatgaagaaacaaaagaaaatcaaactgagttagaagcggttatcgatcatatcgaatctattacaacacgattagaaattgaagaagttaagcgtccatggttaccaccattaccagaaaatgtatatcaagaagatttagtagaaacagatttcagaaaattatggtcagatgatgcaaaagaagtggaattaacattaggacttaaagacgtaccagaagaacaatatcaaggaccgatggtattgcaattgaaaaaagctgggcacatcgcgttaatcggaagtccaggatatggtagaacaacgttcttacacaacattattttcgatgttgcaagacaccatcgtcctgatcaagcacatatgtacttgttcgatttcggtaccaatggtttgatgccagtcacagatataccacatgtcgctgattactttacagtagatcaagaagacaagattgcgaaggcgatacggaagatacatgatattatttctgagcgaaaaagactattaagtcaagagagagtagttaatatagagcaatataataaagaaactggaaattcaattccaaatgttttcttaattatcgataactacgacacggtgaaagaatcaccatttatggaagaatatgaagaaatgatgtctaaggtaacacgtgaaggtttagcgttaggggtatacatcattctttcaggatcaagatcaagtgcaataaaatcagctatatttactaacattaaaacaagagttgcgctgtacctctttgaaaacaatgaattaacaaatattattggttcttataaaaaaggtgtgaaagatgttaaaggtagagctgcaataaatgatgataacttcacacagttccaaattgcgcaaccatttgaattagcagaaggacaaacatataacgagcgcattaaaaatgaagtagcacaaatgaaagaattctatgtaggagattatccaaaacatattccaatgatgccagataaggtatttatggaagatattcgagaagcatatgatttggaaaaaatcattcatgaagaacacaaattaccattaggattagactttgaggatgtggaactagttagtttagatctgacaagttcttcgattgtaacagcaattaaaccaactgagatggaaaaaatgaatgatgttataatgtctagtttatcagtatatagtaaaaaccaatttgttatcttggttgatgcagaagataatatgagccagtattcagaagatgtaacctcttattattcagcaccatcagatttgagcaacattagattaggatttaagcaagaaatagaagcaaggaaaaatggcgagaaaagtatagaggaatgcaagattgtatttataaataatattaaacgattcaatcaattaactggaatgacagaagatgaaattcgtgtgttatttaatgaaggtcaaaaagttaatattatcattattgcaagtggactatactcagatacaattggtgcatttgatagagaaagtaaaatgatggtaagaactataaatcaagctttgattagtcataagatatcggaacaagaatttataagagttaaagatcgatttggtgaaccagaattaaaagtgggagaaatgtattacattaataatcaagaatatcaaaaaataaaactaatggagggatagagttgataaagttaaaccaagcctctgtcagcaaagaaatttcaagcattcgaacaaatggacaaggcttaaaacaatcaaatgggaatgtaaatttaagtaaaacgaatctcgttacttttaaagaatatgtaaatatgtttgaagattatcaatcagctctatctaattatgaaaacataattgaacaagatacgacggctatggatacaacggtaacagaaattgttgaaaacgatagagaaatagcaggacaaattaataaataattaaacaagacgggtgagaaaaatgagtaataagggagaaataagaaggcaaattgctaataaagaaagagaaaaagcaagtaaagaagcacaactaacagatttaaaagaggatttaagaaggttgaaagacgcttcgaaaaaattggatacagcaggagaagattttaacaaaggacagagtagttataacaaagtagaaattagtacttcagattggaaaggagaaagaaggactaaaagtgacagcaaaaagaaagatgtcgattctgaattaaaaaaagttgaacaagactttgatgatgcgaagaaggctattaaaaaagatattcaggataaagaagaagaaatcaagggagtcgaaggagaaatcagtactataaatgcagctatagatgcacttaaatcaaaattataataatagagagggaaatttattatggggtacaaagttgatatgtctgaagtgcacaatatgcaaaagtctattgattcaagcttaagtgcaataaatacaaaggttagcacgcttagcagtagcataaacaaccttataaatactgaaggattcgaaggtcagacagcaagtagtgtcaaaaactatagtaagacatttcatttacaatcaataaaaaagattgaaacaataaacaaagattttaaatcagatattgcgaaatctatacgtaaattccaaagtgaagttgataataatgcttcagctatattggatgaagacgaaataaaaaaatacaaaaaagatattgatgatgcattaaaagatgttttcaaatcttctaaagatgcaaacggagctatttcagatgtttcagatttaacaacagccaaaaaaataaagacagaaaacttggccaataaaatgggagattttaataaagatattgatcaaacggtggaaagattaacgaccttcgacgccaacaattctatagatggtgataagacagataacttaataactgaattaagtggtgtaaattcatatgtcaaaaacatgaagccaaaccgtgcaagaattagttctacaagtggaaaaattgaaggtgcaattgcaaggcataaaacaagtgaagagttagtaagatggcaaacttacatggaaacgttaagtgaaaatctttataaaacaccaggtctaagtaaagcagcttctgacataattacccaagctggacgcgagtactatgctatcaaagctgtagggaatggcagtgctttaagaggatataaagaatatctgaaaacacgagatattaataaattaattaacaaaatgaataaaaaccaattaaaaagaatgtcattggtattaaatacagatagaggtaatattaaaataaaaaatgcagtaaaaatggcaagtgaatttgcccgtaataatccttttaaaaaaggaaatttagtaaattggatgagcaaagtccaagggtatcaaagtgtaagtgctcaaatattaaaaaaggggttgcaagataagaactttaaatatacatttggagatgcaaagaaattttttgatacagctgatatgaaaaaagcagcagtcacagaatttaaaaatacctttgtaccacaaaatataagagaaaccttctttaagaaagaaaatttaacatctaagacagcattaaagaaaaatatgagtaaattctggaatgaagatattaagggtggaatcaaagagtttaaattagactttgctaacaaaaatatcattggtaaactcggcaaattgttgaaactaggaggcaaggctttaaaaccattaggatttattactgcaattactgacaacataggaaagaaatcttggcaagaaaaattagttggtatgggggtagatttaagtgctattggtgcaagtgcagctgcaggtgcagctgttggaacggcaataccattacctgtagtaggaacagttgcaggtgcattagctggagcagcagtgggtatagctttagattataaaataccgtatcttgataagtctgcaacagaattagctaaagatggtattaactcgggtattaacaaagttaaaagtggatttggaaaagtaacttcaggatttaaaacagttttcggataagaaaggggcagacaaatgaaaatacaagagattgtaggaaatataaagagagcttatctgacaccattaataatttttgtgattttgttttcattattttttgatttgataatgtatttttatggaaaccttcaagggaaattgccaatatatttagatgtatttctaatatttgcagcagttgtatttattttaatgtacttccaagagaaaagtggagaagttaaggttgaaaaatcaaacgttattcgttatttaacattaaatgttgtagctgggtattcaatggtactacttgttgcctctatttatgtttttggggtagcaggctatggttttgatgtatttaattactggttaggtattatattaatgctatttgtatcgtggtttgctctatttttgttttataaaaatgaatttgatagtgaaaatccaaataaagcagttaatgttatagcaattattataaagttatctgcttttggaggacttttctatatcagaacagtcgttcctaatactgcagatgaagagaaatttataactctaagtatcttaattaatatagctgttgatttattgctggttagatcatattttaactatgcattatataagagtgtaaaaaaagatatcgaaaacggagtggatgattaatggaagtaggaatgttaattatgccgttttgtgtgaagattacatttgaaattgataaaaatgataattggttaaatgcattagatacagtaaatgaatttttcatggacaaagatatatatccaactggtcctataattttccaaagagaattagcaggtttgggtgaatataaatatacagcatatatagctcttaatgatgaacttcaagatatacctgaattgaacatcaaatatattgattgtttagaggtaggacctacgttatcaactaagtgttttgaagaagaggaatttgaaagagcttataaagaaattgaatatgtagctaacgaaaataatattaagatcctaaatcaaccatattatcatgtaatggtagattattttggtggtacggcttttgaaatttatgctcaagtagatttggatgagagtgaagtatatggataaaaatggatactcatatattatgatgaaaaatgtagcttacaaaacttattttgatgtgactatggatgactatgaagatatattaaaagactttacaaatcttgcaatttctaaaggtaaaacaattacagggccattaacctttgcagtcacgcaaatagacttgcaaaaaaggatgaatattgatttatttatttcagttggaaaatgttttaaatcaaatgaagaactatcatatagaacatatttttgtctagataacatgttacatggtcgtatcacttccaacaattttataacagatgaaatagcgttacttgaggatatgaacgaatttgcttctgacaacaatttaacgtttacttcgccttattatcacacaatgagaaaaagttttagcggtgaacaaggttggattgatgtaaaggccaaagtgtatgaaaatgattaattaataatcagtagaggtaatatatgataatttttattttattaacagtttttgcactcttttatatagcgatgattgctagtttatttaaaagtgaaggtttttcaataataggcttaatattggatatagttattttgacaacgttaatattttattattttgtaggtgcgagttttgttgataatgatttaagtaactttttagcattcatgaattttgggtcatttgtgtatatgtactatgcaattaagagcttgtgggtgaagcctaagttagtaaattatataattgcaaaagaaataggcgaatcaaaagatgtcattgaagaacaggaattagatttacagacatcaaagataagaggtatctactttttcattattgcaattgccttgttaataattactaaattaagaatgcaacctgagttacaggcagatgctatatcgatgaatccagtttttatttttataggagttattatcattttaatttggctagtactggatatatatcgtaagaaaaaatacggtatattcttattcaagacgatagtgccattagttgttacgacttggattattatagctactattgtactttcataagaaaattttcaataatttttttggttataattgttgatggatattaattaatcgatagaaaaatcttaatgatttttgaaaaatatgtaaaaagtatatactattaatatcttttttactgtaattataaatagttaaataaattgaaagacaaaataatgagtaggagttaatgagatggaaaaccaaaaacaaggcaatggcttaaaaattgcaacatgggtatttattgtattaacagtagttacaccgctatttggtattggaagtattgtttgtagtattaattacaaaaaatacgatgcagaaaaaggttcgaagttattgaaaattgcaattatcgtaacaataattgtttttgttttaaatttattagcatatttaggtttaagataagtaaaatgaatttgaagaagcattaagcgacatttgggtgttgtttaatgctttttatttaacggaaataagtgtagagaataaattaatagcttaatcaagagatatttcgaacacataggggcgataacatgactttcgaagagaagttaagtcaaatgtacaacgagattgcgaatgagatcagtgggatgataccgatagagtggtaaaaagtatatacaatggcttatatagatgatgaaggtggagaagtgttctactattacacagaacctggaagcaatgaattatactactatactagtgtattaaataaatatgatatatcggaatcagaatttatggactcagcgtatgagttgtataaacaatttcaaaatttaagaaatatatttaaagaagaaggatatgaaccatggacatcatgcgaatttgattttacaaaagaaggtgaattaaaagtttcatttgattatatagattggatcaatacagagtttgatcaattgggccgtcaaaattattatatgtacaaaaaatttggggttataccagaaatggaatatgaaatggaagaagttaaagaaatcgagcaatatattaaagagcaagatgaagctgaacaataggggagataacatgactttcgaagaaaaattaagtgaaatgtacaatgaaattgcgaataaaattagtagcatgataccagtagaatgggaaaaggtatatacaatggcttatatagatgatggaggaggtgaagtattctttaattatactaaaataaacagcgatgaattgaattattacaccgatatacctaaggagtataacatttctgtgcaagtatttgatgatttatggatggatttatatgatttgtttgaggaattaagaaatttatttaaagaagaaggacatgaaccatggacatcatgcgaatttgactttacaagagaaggtaaattaaaagtttcatttgattatatagattggataaattcagaatttggtcaaataggtcgacaaaattactataagtatagaaaatttggaattttaccagaaacggaatatgaaattaataaagttaaagaaatcgaacaatatattaaagagcaagaagaagctgaaatataggggagataacatgactttcgaagaaaaactaaatgaaatgtacaacgagattgcgaatgagattagtgggatgataccagtagagtgggaaaaagtatatacgatagcctatgtaaatgatagaggtggagaggtcatttttaattatactaaaccaggtagcgatgaattgaattattacacgaatatatctagagattataatgtttcggaagaaatatttgatgatttatggatgaatctttattacttgtttaagaatttaaggaatttatttaaaacagaagaacatgaaccatggacatcatgcgaatttgactttacaagagacggaaaattgaatgtatcttttgattatatagattggatcaatacagagtttgatcaattgggccgtgaaaattattatatgtataaaaaaattggggttataccagaaatggaatacgaaatggaagaaattaaagaaatcgagcaatatattaaaagccaagaaagttaattataggaaagaggttaagcaataagatttgtttaatcttagtttgctgcaatttaaaattgctgatatttctaggaagaatcattcgaaattgaaagtgagagtgaactcataagtggttcaataacaaattgtataaaaaatattgatcataatatcgatagacttatcgataaaattaccgagatgcaaaatgaagttaattcattagatagtacattatctgtactagaaaatgcaatggattcaatagctgctgctattgaaaaattaactaattaaaggagcagtaatggaaaaaataaagaaaataaacaaaatatttttatcatttgaagttattccatttgcaatgatgattttactggcgtttctaccagttattgcaggtataattaataatcgtttgcagtatggtagggattttggcgatagagtaagtttttattgttatatttcaattatggttgcatatgcaattaccattttgttagaaattattttttactttattttattgaaaaactatcaatatgatcaaaacaatattgaattagctaatagagtgaaagttacaaaagtactgtcgattttgtatatgattccaggattatatgcgattccattctattttagatttttacatgttcgctcatttagagaaaataaaaaatccggacagccggcctatcacttttgggaattttttataaaacctaatcgaaaaccgatagagttgaaagacttttttattaaaaatagatgattaaggagtaaccgatgaaaagattaattataggaatgttaattataatgatgagtataatcaattatggttgtggcaataatcaaaatgaaaataaatataaaagtcaaattaataaagtaatgaaaattcaacaagaaactcataaagagatggttaaaaagagtaatgaagttaatcctgaatttaataaggataaagtaaatacttatgtatttaatgatggcaaattaattatcataagctataagttatttaaagataaagatcaaatgttttacgcgacttacgagtttaaaaacgacaaaattttttataagagagatattgatcctaaaacatacgtgaaagaacaccaatcagattataaagatattaaagtaaaataatttaaaggagtaggaaaatggaaaaattaatcaaagtgacgtctttaattggaattattattcaaagttttttaacattgttatttttaatatttttaattttatcagcaacaggcattatacagccagaattgaccacaactgttaatggtgaacaaactatacaaagcccagaaactgctcaagcaacattcgtgacaatattcgcaatattatttgttgtttctttagtttcagatttattaggcattatagctatgaaaaagttgtttgtgaataataaagcgagtggtattttgtatattattggtgcagttatcagtgccaatttattaacatttattgtttggttaataagtggggtttctgttttaagatataacaaaataggaaaagaagtgtcatagcatgaaatatacttggtggatactattaacaattgcaggcattttaagtttaacaagtgtttatggatttattttatgtttaggtagctttggaatgttggcactgaatgtcatgtggctatttgtttatacgccgcataaaaattctaaagcacttgaatctatatcaaaaccaacgataattttatcaatcattgggacatatgcagtatttatatttatgtctatcttattttacttcgtaatgaaagctaggtttatggaaattggaataaaactttatggtgaaccttttaagatgtttggaataccaatattcatcatggctatcattttatttacaatcggtacagtattcgtttataaaatacagcaatcaagattaaagcagtagaatatattaatttaaaatgggacgggtttaaaagaaatccgtcctaatgatttatacataatagatgtagctgaatctaaaagacttcaaatactttgaagataaaaagataatgacaatgaatgtaaaatgtgatttttacaatattaaaatataaaaattccaactgaaaatgtaatggtttagaaaggaaatctaaattttaataacgataaatgaaggatagataaacatgagtaacttaaaccagtttgataaatttgtaccttcatttatttgcgttgaaaatcacgattctgtttccattttcgaaaaatagaaacgagtatcgtaaataaaaactctcatggatacaaggcgattatatagtttcaagatgatgaaccaatttaggacgaaatttaaatggatggatatatttagattttactgaattgtaaaaatagaatttcaagttatttgaatgtatttataaatatatcgttattattaaagtagagattaggggagataacatgactttcgaagaaaaactaagtgaaatgtacaatgaaattgcaaatgagatttgtggaatgataccggttgagtgggaaaaagtatatacgatagcctatgtaaatgatagaggtggagaggtcgtttttaattatactaaaccaggtagcgatgaattgaattactattcagacatacctaaagattgcaatgtctcaaaagatatttttaagaattcatggtttaaagtttatcgaatgtttgatgagttaagagaaacttttaaagaagaaggacatgaaccatggacatcatgcgaatttgattttacaagagacggcaaattgaatgtttcatttgattatattgattgggcgaattcagagtttgggccaatgggaagagaacattattatatgtataaaaaatttggaatttggcctgaaaaagaatatgccataaattgggttgaaaaaataaaagattatgttaaagagcaagaagaagctgaactatagggtagataacatgactttcgaagaaaaactaaagtgaaatgtacaacaagattgcaaatgagattgttggcatgatacctgtagaatgggaaaaggtatatacaatagcctatgtaaatgatagaggtggagaggtcgtttttaattatactaaaccaggtagcgatgaattgaattattacatgaatatatctagagattataatgtttcggaagaaatatttgatgatttatggatggaactttatagatcatttaaaaaattaagaaatatatttaaagaagaaggacatgaaccatggacatcatgcgaatttgattttacaaacgaaggtaaattaaaagtttcatttgattatattgattgaaagaatacagaatttgatcaattgagtcttgaaaattattatatgtacaaaaaatttggggttataccagaaatggaagaaattaaagaaatcgagcaatatattaaagagcaagatgaagctgaaatataggggagataacatgactttcgaagaaaaacaaagtgaaatgtacaataaaattgcaaatgagattagtgggatgataccagtagagtgggaaaaagtatatacgatagcctatgtaaatgatagaggtggagaggtcgtttttaattatactaaaccaggtagtgatgaattgaattattacacgaatatatctagagattataatgtttcggaagaaatatttgatgatttatggatgaatctgtattacttgtttaagaatttaaggaatttatttaaaacagaaggacatgaaccatggacatcatgcgaatttgactttacaagcgaaggtaaattaaacgtatcttttggttatgtcgattggattaaattaagtttaggtccgttagctagagaaaactactatatgtacaaaaaatttggggttataccagaaatggaatatgaaatggaggaggttaaacaaatcgagcaatatattaaagagcaagaagaagctgaaatataggggcgataacatgactttcgaagaaaaactaagtcaaatgtacaatgaaattgcaaatgagattagtgggatgataccagtagagtgggaaaaggtatatacaattgcctacctagatgatgaaggtggagaagtcgtttttaattatactaaaccaggtagcgatgaattgaattattacacggatatatctagagattataatatttcagaaaaaatatttgatgatttatggatgaatctttattacttgtttatgaatttaagggatttatttaaataagaagatttagaaccatggacatcatgtgaatttgactttacaagcgaaggtgatttaaacgtatcttttgattatatagattagattaaattaggttttggcccatcaggaaaggaaaactactatatgtataaaaagtttggtgttttaccagaaatggaatatgaaatggaagaaattcgagcagtagagaagtatgttaaagagcaagagtagcagacatgttataaaaggctgtgcaaaaccaacctcgttttacatttgattcaaagaagaaggtaaaaaataagattatttgcaacttaaaaagtcaattagcttatcggtatccatacatcatggataaataagttcaactaattaacaaatcacgatataaatttaaaattgtcattaattgaaaaggttattgtagtgtattttataaagttgatgtacatcgacttattttttaaaacttatatcaaaaaaatatgagaaaagtatatactattaaaatgttttttactataattataaatagttaaatatttgggtataaaataaatgtgtgggagcaatttttagagatacatagcaatgtaaaggtatcaaatacttattgcataatttattatgatgacataattttcagtagatagttgtaaattaacactgaaatagatgtttatattaagaagactttaatatcataattaatcaaaatcttgcgtcaaacatttaaacgaattttaagttgataacaattggctaaacattgttcaaacatcacaatgataaagcatattatcagtattgtagtgtgtggaaaatgacagccatctaaggagaaaaatgatgaaaagaatattggtagtatttttaatgttagcaattgtattagcaggttgttctaataaaggtgaaaagtatcaaaaaagatattgataaagtgtacaaagaacagaatcaaatgaataaaattgcctcgaaagtacaaaacactattaaaacagacattaaacaagaagacagtaatacacatgtctataaaaatggtaaagtcattgttattggtattcaattgtataaagatcgtgaaaaaatgtattatttcgcatatgaaataaaagatggtaaggcagagattaatagagaaatagacccaattaagtatatgaaagaccataaagcagattatgaagatgaaaatgtagaagtggaaaaaaaataacgtatgctttctttaaaacttttaaccagtttcaaaaaataaatgagctttagcgataataatttttacaataaacacgatataaatttaaatatttatatataagaacacaaacgtaagtttgtaaataataataaaggagtaaggcaatggaaaaatcgatcaaaataatgacaataataggaattgttgttcaaggtttagcaacggtatttagtttactattgatggttttagcagcatcaggtgtaatgactacagatgtgtcaacaacagttaatggtgaggttgacccagttgatgcagaaacagcagcagcaattttcactgtattattcttattcctattcatatttggaatcatttcaattattttaggtgcaatcggtatgtttaaagcatctaaaaaacaaaaaaatgagtggaatattgttgattattggagctgtaataagtggtaacataattacatttgctttatggttagtcagtggtattaaactccttactaataacaagcctaaagatgaaataagcgacttatcataaacatcgtatattgaaatttcaagatttcttaagtaattatatttctgttagtttttaataaattaaccaattaaataaattgctctcttagaagtagattttcagtcaataactgcttttaagagagcattttgtatttgataatgctcatagcatcggacaaaaaccattgacgaactttaaaaaaatacgttagacaatgcacttctaaatattaaaggcatcgactaacgcattgttcaaatagagttaattatttttataaaattgatgatgatcattcaagtaagcatagaataaacctataatgagaccgcctccgatatagttaccgataaaagcggcagcaatatttgaaatagcaggaatgaagtgcaatgtatcaacttgataaattaagcctcccataaacaagcaactgttgtaaacgacatgttcataacccataaaggcgaatatggtaacaccgaacatcatgacaaacatttttgcaagtacatcgtcaatttgcatggcgataactaatgaaatattaataaaaaagttggcgaatatcgctttcattaatatacttacaaacccagtagacaacgttttatgttctataactgctgataattgatttaacatatctggcgtcattacatttgaaaaacgcatgaaactaaataaaatagcagcacctaaaatatttcctgcaaagcacaataaaaatattttcaatactctagtcggtttaattactttataatacaggcctacagtaaagtacatgaagttactggttagtagttcggagtttgtaaataaaatgagtactaacgcaaaactgaatgtaatggcgctggccatattcacaatgcctggcggtaaatctggttcgtgtgttgctttaactgataatacgaagaccgtaataatcccgataataaatcctgccatcatcgcgcgtaatagataacgttttaaataaacgctttgtaatatatctttcgttcttatcgtttcgactacgttatttacccagtcgtccccataaaatattttatcccatttaatatgtttctccttcacaatgacatcctcacttttcatttgttaatcagagtatactatgaatcgccttatttgtgaataatttcacaaaattaattttaaaaactaatatttttgaataacagctaggattttttaacaaatcatttattttaaaataattaatagacagacggtatcactgaaaagtcatgaatttcatataaaaaagcctagtaacgatgggtcaatcattactaggcagtgagcatttattaagttgtcgcttgtttcggacgacgtataaatacatcgatgatgaaaccgataatagcaaagagcatgaatggtacaagccaagctaaatcgatatctgctaaaggtaacatcataaaccatttcaaaataacaccgtgtaataagttgaaactatttagtatttgtaaaattgaaataatcaatgtaataacagttgcgagtcgataggcccaactgaatctgaatgtgctaaacatgttagcaaatgatatcagtacaagtgcaatagacacgggatatattaatgtcaacaatggtacagcaatttttaaaatcatttctaaaccaagtgttgtaaataaaaatcctatgatggagaaaacaagtgcgaatattttataagaaaacttaggtacatgtttcttagtaaatgttgcacaagcgttgacgagtcctatacatgttgttaggcatgcaagaataaccgtcattccaaatacgaggttaccgaacgaaccaaatactcgtaatgagttgtacgtcaatatatctgtaccatctttaaagtttcctggagctgttgatgccccaacgtatgcaagtgcaaagtaaatcattccaagtaatatggctgcaataagacctgaaaagcagacatattttaaaattttcatgcgatctgtgaggcctttaaacttatagccattgacaatgactacggaaaaagctaacgcagcaacaagatccattgtaaaatagccttccaaacttcctgaaatgaaaggatgtgttatatatttatccttaggtgcacttagtacagattcagggttgaaaatgacagcaatacttaatagagcgaccattaatagtaataacggtgttaataatttacctaaattatcaacgattttcgatggatttaaactaatccagtaaacgatagcaaaaaagattgctgcgaatataattaaagtccattggttgtgcacaggtaaaatgtgtcttgtaccaatttcgtacgcgacatttgcagcacgtggaataccgtaaaatgctccgatagacatgtaaatcacgacagcaaaaataaacccgaaccatggatgtatacgattgcctacactttcaacaccttcatcataaaatgcaacaacaataacagtaataaaggggagtaatatgcctgtaagagcaaagcctagcataccaatccacatattttgacccgctgtatggccgagcatgggcgggaatattaaatttccggctccaaaaaatagtgaaaataacatgaggcccgaaataataacttgttttttcaatgtaatttccttcctaaaactagatattcataataatttaaaaaatctgaaaaataaaaacgttcttactttatctttaaatgacaatactatgattctattattttataaaaaagattgcaataataacgtcttgctattattggataatgacaattaaagtgtcgtttttatgaattaaaataggtgaaagtaagttggaaatacgttggagcgttgtgatttttatgagaaattgtatgagtgaggactgctatttataaaaggtaaactatggatgagtttatggttgttccaataggtaaacaagagatagcacactgtacacataatgatacgtggatgagtgaatatgactgataggaaggcctagtcactcaaatgaattaaagtttattacgtgataaatcacaaatctctctcatgtgataggtctcccattaaatcatgcttatatgaaatgttcacatatttgttagcttttcaagaaataatattaaatatcttttcatagtatagcaatattaaataaatgcatttataattttaactgtattttaaatattaatcatgaggtgataagatgaataaaatttcaaagtatattgcaatagcatcattatcggtagcggttacagtttcggcaccacaaacgacaaattctacagcgtttgccaaaagttctgctgaagttcaacaaacacaacaagcttctataccagcatcacaaaaggcgaatcttggtaatcaaaatattatggcagtggcttggtatcaaaattcagctgaagcaaaagcattatatttacaaggttataacagtgcaaagactcagttagataaagagattaaaaagaataagggtaaacataagttagctattgctttggatttagatgaaacagttttagataattctccatatcaaggctatgcatcaatacacaataaacctttcccagaaggttggcatgaatgggtacaagctgctaaagctaaacctgtctatggcgcaaaagaattcttgaaatatgctgacaaaaaaggtgtcgatatctactatatttctgatagagataaagaaaaagatttaaaggcaacacaaaagaacttaaaacaacaaggtatccctcaagctaagaagagtcatattttactaaaaggtaaagatgataagagtaaagaatcacgcagacaaatagttcaaaaggatcataaacttgtcatgctatttggagataatttattagactttacagatccaaaagaagctacagctgaatctcgtgaagcattaattgaaaaacataaagacgatttcggtaagaaatatatcattttccctaacccaatgtatggtagttgggaagctacgatttacaacaataactataaagcaagtgacaaagcaaaagataaattacgtaaaaatgctattaagcaattcgatcctaaaacaggcgaaattaaataatatatgaattggacgtctacatgtacttaaaggtatatgtaggcgtttttaaattgatccttaattttaaatgtaccgtacaaaaataatagacaattaattgcattttccataaatttgcttttaatataaaaagttcgggtataatgaaggataagtgtatgtataacattacagagcgcaacacgacgtacgtgcatctaagaatataaacaatgtttaaatcatagtagtagggagagaaatgcatgtttttagcttggaatgaaatacggcgcaacaaattgaagtttggactaattattggtgtgttaacgatgattagttacttgctatttttattatctggattggcgaatggtcttatcaatatgaataaagaaggcattgataagtggcaagcagatgccattgttctaaataaagatgccaatcaaactgtgcaacaatctgtttttaacaagaaagatattgaaaataaatacaagaaacaagctacattgaagcaaacaggagaaatagtttctaatggtcatcaaaaagacaatgtcttagtgttcggtgttgaaaagtcatcatttttagttccgagtttaatagaagggcataaagcgactaaagataatgaagtgttagctgatgaaacacttaaaaataaaggatttaaaattggcgacacattatcactatctcaatcagatgaaaaattgcatatcgtaggttttacagaaagtgcaaaatataatgcgtcaccagtcattttcacgaatgacgctaccattgccaaaatcaatcctagattgactggagataaaattaatgcagttgttgtacgtgatacaaattggaaagacaaaaaattaaaccaagagcttgaagcggtaagtattaatgactttattgaaaatttaccaggttataaaccacagaacttaacattaaactttatgatttcattcttatttgtcatttcagctacagttataggtatattcttatatgtcatgacattacaaaaaacaagtttatttggcatattaaaggctcaaggatttacgaatggctatttagcgaacgtagttatttcacaaacgctcatattagcattatttggtacggcatttggcttactgttaacaggcgttacaggtgcatttttacctgatgcagtacctgtcaaattcgatgtactaacattgctcgtatttgcaattgtgttaatgattgtctctgtattaggaagtttattctccattttaacaattagaaaaatagatccgttaaaggcgattgggtaggaggtgtagcaaatgttgaaatttgaaaatgtaataaagtcatttaaagatgggaatcgtaacattgaagcggttaaagatacaaattttgagataaataaaggtgatattgtagcattagttggaccttctggctctggtaaaagtacatttctaactatggcaggtgctttacaaacaccgacatctgggcacattttaatcaataaccaagatattacgacaatgaagcaaaaagcattggcaaaagttagaatgtctgagataggttttattttacaagctacaaatcttgtaccatttttaacggtaaagcaacaatttacattattgaaaaagaaaaataagaatgttatgtctaatgaagactatcagcaacttatgtcacaattaggtctaacatcattgcttaataagttaccttcagaaatttcaggtggtcagaaacaacgtgtggcgatagccaaagcgttatatacgaatccgtcgattattttagcggatgaacctaccgcggcgttagatactgaaaatgcgattgaagtcattaaaattctacgtgatcaagccaaaaaaagaaagaaagcatgtattattgttacacatgatgaacgacttaaagcatattgtgatcgttcatatcatatgaaagatggcgtccttaatcttgaaaatgaaacagtagaatagttttattaagccggtacatcatgtgccggtatttttatgtttatgtattatttgaataaactttcacattcaattaataataattattatcgaaaattagaaatattccgtgaaatataatattttttgtagtaaaatggcctctaagtattcaatatttaaatatggggattgaatataaaattatcgtaatgggggtcaatggttatggatttattaataggtactttatttttatttttggtcttagtgatttttacattatttacatataaagcacctaatggtatgcgcgccatgggagcattagcaaatgcagcaatcgcaacatttttagtggaagcatttaataaatatgttggtggtgaagtattcggtattaaatttttagaagagctaggagacgctgcgggaggtctaggtggtgtcgctgccgctggattaacagcattagctatcggtgtgtcaccagtatatgcattagttatagcagccgcgtgcggtggtatggatttattaccaggtttctttgcgggttatatgattggatatgtgatgaaatatacagagaaatatgtgccggatggtgtcgacttaattggatcgattgtcatcttagcgccattagctcgtcttattgcagtattattaacgccagtagtgaatagtacattgattcgaattggtgatattatccaaagtagtacgaatacgaatccaattatcatgggtatcattttaggtggtattattacggttgtcggcacagcgccattgagttcaatggcattgacagcattattaggtttaacgggtgtacctatggctattggtgccatggcagcatttagttcggcatttatgaatgggacgctattccatcgcttaaaattaggtgatcgtaagtctacgattgcagtaagtattgaacctttatcacaagcagatattgtatcagccaatccaattccaatctatattacaaatttctttggtggtgcgattgctggtttaattattgctatgtcaggtttaattaacgatgcgacaggtacagctacaccgattgcaggatttttagtaatgtttggatttaatcatccaatgactattgtaatttatggtgtagtaatggcgattgtaggtgcgcttgcaggttatcttggttcaatcgtatttaaaaaatatccaattgttactaagcaagacatgattaatcgaggtgcagttgacgcatagcatcatcatattgaatagtaaaaacaaataaaacatagtaacgtgattcagtcgatgaaaaaatcgataatgagtcacgtttttttatagaaaaatataagacataaaaatgtcataatttatagtcgacaaatatcacgccacataaacacttatcattttcgtaggtgccttttactttatggaatgaacttactttttacgaaattatgcgtattttataaacaaatatcattgatataacgataaatgtaagcgtttacaacagaaataactgcatgctacgatatttttgtaaattcactgattcaagtattttaagtcaatatgaggagggatgttatgagcgattctgagaaagaaattttaaaaagaattaaagataatccgtttatttcacaacgtgaacttgctgaggcaattggattatctagacccagcgtagcaaacattatttcaggattaatacaaaaggaatatgttatgggaaaggcatatgttttaaatgaagattatcctattgtttgtattggcgcagcgaatgtagatcgtaagttttatgtgcataaagatttagttgcagaaacatcaaatcctgtaacgtcaacacgctctattggtggcgtagcaagaaatattgctgagaacttaggtaggcttggcgaaacggtcgcttttttatctgctagtggacaagatagtgaatgggaaatgattaaacgattgtccacaccatttatgaatttggatcatgttcaacaatttgaaaatgcgagtacaggttcatatacagctttaattagtaaagaaggcgacatgacatatggcttagcagatatggaagtgtttgactacattacgcctgaatttttaattaagcgttcacacttattgaaaaaggctaagtgcattattgtcgatttgaatttaggcaaagaggcattaaacttcttatgtgcctataccacgaaacatcaaatcaaattagttatcaccacggtttcttccccaaaaatgaaaaatatgcctgattcattacatgctattgattggattatcacgaataaagatgaaacagaaacatacttaaatttaaaaatagaatctactgatgatttaaaaatagctgctaaacgctggaatgatttaggtgttaaaaatgttattgtgacaaatggcgtgaaagaactcatttatcgaagtggtgaggaagaaatcatcaagtcagttatgccatcaaatagtgtgaaagatgttacaggtgcaggtgattcattctgtgctgcagtagtgtatagctggttaaatgggatgtctactgaagatatattaattgctggtatggttaatgcaaagaaaacgatagaaacgaaatatacagttaggcaaaacctagatcaacagcaactttatcacgatatggaggattataaaaatggcaaatttacaaaagtatattgagtattctcgagaagttcagcaagcacgggagaacaatcaaccgattgtagcattagaatcaacaattatttcgcatggtatgccgtacccacaaaatgttgaaatggtaacaacagtagagcaaattatcaggaataatggtgccattccagcaaccatagccattatagatggcaaaattaaaattggtttagaaagcgaagatttagaaatactggcaactagtaaagacgttgctaaagtatctagaagggatttagcagaagttgttgcgatgaagcgtattggtgctactactgtagcgacgacgatgatatgtgctgcaatggctggtattcaattttttgttactggaggtattgggggtgtccataaaggtgcagaacatacgatggacatttcagcagacttagaagaattgtctaaaacaaatgtcactgttatctgtgcaggtgccaaatcaattttagacttacctaagacgatggaatatttagaaacaaaaggcgttccagttattggatatcaaacgaatgaattgccagcattcttcactcgcgaaagcggtgttaagttaacaagttcggttgaaacgccagaacgacttgctgacattcatttaacaaaacagcagttaaatcttgaaggtggcattgttgttgctaatccaattccatatgagcatgccttatcaaaagcatatattgaggcaatcataaatgaagctgttgttgaagccgaaaatcaaggtattaaaggtaaggacgccacaccgttcttgttagggaaaattgtagaaaaaacgaatggtaaaagtttagcagcaaatataaaacttgttgaaaacaatgcggtgttgggtgctaaaattgctgtcgctgttaataaattattgtaggtgatgatacatgaatattttattcgctatcacagggatagcatttgcactatttgttgcgtttttattcagttatgatcgtaaaaacatagacttcaaaaagacgttaataatgatatttattcaagtgttgattgtgatatttatgatgaacacaacgattggtttaacaatcttaactgcattaggttctttttttgaagggttaataaatgttagtaaagcaggtataaactttgtttttggagatatacaaaataaaaatggctttacattctttttaaatgtgttgctgccattagtgttcatttctgtattaataggcatttttaattatattaaggtattaccatttattatcaaatatgtaggtattgctattaataaaataacgagaatggggcgtttagaaagttactttgctatttcgacagcgatgtttggacagccagaagtgtatttaactataaaagatattataccaaagttgtctagagcaaaattatatacaattgcgacatctggtatgagtgctgttagtatggcaatgttgggttcatatatgcagatgattgagcctaagttcgtagttacagcagtaatgttaaatatttttagtgcgcttatcatcgccagtgtaatcaatccctataaatctgatgatactgatgttgaaattgataacttaacgaaatccacagaaactaaaacattgaatggaaaaacagggaaacctaagaaagttgcctttttccaaatgattggtgatagtgcgatggatgggtttaaaatcgctgttgtagtagccgtaatgttgttagcatttatttcattaatggaagcaattaatatcatgtttggtagtgttggtttgaactttaaacagcttattggctatgtgtttgcaccaatcgcattcttaatggggattccatggagcgaagctgttccagctggctctttaatggcgaccaaattaattacaaatgagtttgtagcaatgcttgattttaaaaatgtcctgggtgatgtatctgctcgaacacaaggtatcatttcagtttacttagtaagcttcgctaattttggtacggttggtatcatcgtaggttcaattaaaggcattagtgataaacaaggagaaaaagttgcatcctttgcaatgaggctgttacttggttcaactctagcttcaatcatttcaggatcaatcattggcctagtattataaattaatcgaagtatctaaattaaattcatggcaaagctaaaccccatcaccaaggtggcgcaacagcgcatcataacttagtgacggggttttatcataacaatctactttttcgtagccgtttttgaaatgtatgttgatggtttatctttttcaaaaattgttaatcccgttatatcttttttatgttttgaagggacaatgaagctaagtatataagcaaagacaaaagcaactgtaaatgaaatggtagatacatagaaaggtgagttacctttgccaacaccattatagacataagcaaagatgatacccaatattaatccacaaataacaccgaatgtattcgtacgtttagtgaaaataccaactgcaaatacaccagccaatggaacgccgaataatccagttacaaacaagaataaatcccataagtcatttgaattagaagcaattaagtatagtgacattccaaaaccgaaaatacctgcaatgatgataatgaaacgtgcaaagttaacttcgtgtcgttcgctaccttttccgaagaagcgttgcttaatgtcgattgaaatacaagcagatatagaatttaaactagatgaaatggtagactgtgcagctgcgaaaatggctgcaataagtaatcctgctacaaatggtggcatctcagtcaaaatgaaatatggcactacagatgatgtattgaagccttttggtaaaacagcttcatgtgcataaaatgaatacaacattgtacccataccataaaataagggtgctgaaattaaagctaggataccatttgtccataacgatttatttgtttcttttaaactatcagaagcttgataacgctgcacgacgtcttgactcgccgtgtattgatacaaattgttgaaaatatttcctaggaaaataattggaatggcagctgctgcagtattcagtttccaattgtctgcactaattaattttttgtgctcaatcgcatctgcaaagacagtgccaaaaccgcctttaatgttcataacaccaagaatgatgataactaaagcgccgcctaatagaatgacgccttgaatgaaatcactccaaaccacaccttcgaaaccacctaaaaatgtatataaaatacatagtaaaccaacgagtgatgcaacgatataagggttcatgtctgatacagatgtaatcgctaatgttggtaagtagataacgattgctacacgccctagatgataaacgacaaataataatgagccaataacacgaatgctaggtccgaaacgtgcttctagatattcatatgcagatgttacctttaactttttaaagaatggaacatagaaataaatgagtaatggaataattgctacgatagcgatgttacctgcaatatatgaccaatctgttaaaaatgctttctctggtgtagacataaacgtaattgcacttaatgtagtggcataaattgaaaacccaactacccaagatggcaagcgaccacttgcagtaaagaaactattcgtactttggctcgcgcgcttagtaaaataaacgccaatgagtaacatagctagtagatatatgataacggcaacccagtttagtgtgccaaacccaacttctttcatgggcaacatcccctttacaatgtattgattctttgatgtctataaatcgtattttgcaatgagttgatctaatgtttgtcgatgtgcttcgttaaaaggtttgaatggacgtttcggtaatcctgcatcaatgccacggtgacgtagtatttctttcaatgttggataaatccccattgataacactgtttcgatgatgtcgtttgaatcatgttgtagttggtaagcttcttgaatttgaccttgtcttgctaagtcgaagatttttctagcgcggcgaccattaacgttatatgtagaaccaattgcaccatctacgccagaaatcgtagcttgaactaacatttcatcaaagccagataagattaatttgtctgggaatgcttttctaatacgttcgagtaggaagaagtttggcgctgtatatttaacaccaacaattttttcgtgattaaaaagctcgctgaattgttcaatagaaatattcacacctgttaaatctggtattgcataaataatcatattgttctgtgttgcttcgataatatcgaaatagtaatctctaatttcttcaaaagtaaatggatagtagaatggtgttacggcagaaagtgcatcataaccgagttctgtggcatattttccgagttcaatggcttcatttaaatctaacgaacctacttgagcaatcaatttcactttatccccaactgcctctttggcaactttgaaaacttgcttcttctgttctgtatttaataaaaagttttcgcctgagctaccatttacataaagaccgtctaattcttcagtttcaatggcattttgagcaatttgtttaagtccttgttcatttacttgaccattttcatcaaaaggaacgagtaacgctgcatataaaccttttaaatctttgttcattatgaagtccctccaaaaatcatttgataatatagtttacagctataattgtaaacgctatcataaaatgtaacaatatctttttgaaaattgtagtcatatttatgtataattaatgaaaatttttttcaaaatcaatagaaatggagtgagtaaggtgtattacatcgcaatcgatattggaggcactcaaattaaatcggcagttattgataagcaattgaatatgtttgactatcaacaaataccaacgccggacaacaaaagtgagcttattactgacaaagtatatgagattgtaacaggatatatgaagcaatatcatttgatccaacctgtcataggtatttcatcagcaggcgttgttgatgaacaaaaaggcgaaattgtatacgcagggccaaccattccgaattataaaggtactaattttaagcgattattaaaatcactgtctccttatgtcaaagtaaaaaatgatgtaaacgctgcattactaggagaattgaaattacatcaatatcaagcagaacggatcttttgtatgacgcttggtacaggcattggtggtgcgtacaaaaataatcaaggccatattgataatggtgaacttcataaggcaaatgaagttgggtatttattgtatcgtccaactgaaaatacaacgtttgagcaacgtgctgcaacgagtgcattgaaaaagcgcatgattgacggaggatttacgagaagcacacatgtgccagtattgtttgaagcagctgaagaaggtgatgatattgcaaaacaaatattgaatgagtgggcagaagatgtagcagaagggattgcccaaatacaagtcatgtatgatccagggcttatattaattggtggcggtatatctgaacaaggagacaatctcattaaatatatcgagccgaaagttgcacactatttaccaaaagactatgtttatgcaccaatacaaacgactaagagtaaaaatgatgcagcattatatggctgtttgcaatgatggttgaaagaaggagtcattctaaaatagaatttgaaaccgttacgagagatgagagctgttgttagttccacagattatgttatatccatgaccaatctaaactatatcaaccaacagtgtgacacgggcatattaaattgaagaagctgagatattaaaattttagaaaatgtaaaaaatatttggtattgaaattaaaaaagcacctagcaactcgttgggacaatcacgatgattgtctacagttgcaggtggatttgaatatactactagttatttgttgtctaggataatagatttagtatgttgataagtttgactcagattcgtattttctaataaatgatagctcacgatatcgattaaaaagagtgtcgcaatttgtgtgttgataaattgatggtcggtattacgcgattgatccgttgttaaaagtactaaatctgcacaatctgtaagtttactaccttcgaaatttgtgatggcaacgacatatgcaccatgagatttggcgacttccgctgcagaaattaattccgaagtattaccactatttgacatagcaataaacatatccgaatgagatagtagggatgccgatattttcattaaatgtgaatcggtagtaacattaccttttagccccatacgaatcatacgataataaaattcagtcgctgataaaccagagctacctagtccagcaaagagtatatgtcgacttgattgaagtttgtcgataaaggtttggataatgtcgttatcaataaattcaccagtttgttgaatgatttgttgatgatatttatgaattctttgaataattgggctattttcaataactgtctctgtcatttcttgttgaatattaaattttaaatcttggaaattctcataatccagcttatgactaaagcgtgtcatcgttgctggtgatgtaccaatcgcatgggctaaggagttaatcgttgaaaaggcatcgctatagccattttgtcttatataattgacgatgcgtttatcagtttttgtaaataaatgttgataacgttgaacacgattctcaaatttcattgtgtcaccccttcatcttaatgattactattatatatgaaaaatattttcaagatagtaaaaagcattgataaaaattatcttaatgatatattgtaaatgactttacgtgaaaaaacgacttatggagtgaggaataatgttaccacatggattaatagtatcttgtcaggcactaccagatgaaccattgcattcatcttttattatgtcgaaaatggcattagctgcgtatgaaggtggtgctgttggtattcgtgcaaatactaaggaagacattttagcaattaaagaaacggtagatttaccagttattggcattgtgaaacgtgactatgatcactcagatgttttcattacagcaacgtcaaaagaagttgatgaactgatagaaagccaatgtgaagtcattgcattggatgcaacgttacagcaacgtccgaaagaaacgttagacgaattagtatcatatattagaacacatgcaccgaacgttgaaatcatggctgatatcgcgaccgttgaagaagctaaaaatgcggcacgacttggctttgattatattggcacgacgttacatggctatactagttatacgcaaggacaattactttatcaaaatgacttccaatttctaaaagatgtactacaaagtgttgatgcaaaagttattgcggaaggtaatgtcattacaccggatatgtataaacgcgtgatggacttaggcgttcattgttcagtcgttggtggtgcgataacacgaccaaaagaaattacgaaacgttttgttcaaattatggaagattaaatgataacgataaaaaacgagatgaccatcattaattaaaggtacctaattatcttaggtggctgaatgaatgtaatgggttcatctcgttttgtttgtttatgatagtgattttattttcaactttatccaaaaataagtaaagcgacggggatggtgattaatagcgacaatgccacgcgtaaaaaccaaatgatgatgagtttccagacaggtattttaatttcagttgctagtatacatggcactaatgctgagaaaaagataatggctgatacgcttactacaccgacgacaaatttagtactcattgcagctttagttactaacaaagatggtagaaacatttctacaatagaaatcgctgaagcttttgcaagtacagcctgatcagcaattgggaaaatataaataaatggatagaatatgtagccaagccaatcaatgaatggtgtatagttcgctacaatcagccctaaaaaaccaatcgataatatagaaggtaaaataccaacagtcatttctaaaccgtctttcaaattgtcccaaacgttcttcacgagggatggtgttaatgcattttgtttcatcgcctctgcatatgcagttttcagtctgcttccttcaatagcaacttcttgttctccttcttgtccgttataatattctgttgattcattggtgattggcggtagccatgcagtaattgcagtcacgacaaatgtgatgactaaagttatccaaaagtataaattccaatgaggcattaatcctaaagttttagcaatgataatcataaaagttgctgaaactgttgaaaagccagtcgcaataatcgtggcttctcgtttgttgtacatcccttgcttatagacacgattagtaatcaataatcctaaggaataactgccgacaaacgaagccactgcatcgatagcggattttcctggtgttttaaaaataggtctcataataggctccatataaacaccgacaaattctaataagccataacctactaataaagaaagcgcaattgcacctactggaattaagatacttaatggcatcattaatttttcaaacaaaaacggaccatagttagctttaaatagtattgatggaccgaatttaaatacatacattataccgatcattgcacctgcaactttaaataatgtaatgaccaagtttgtgattgaagtcataaaagtacgtctcactattggtaacgctgtaccaattaaaatcataatcagtgcaacatagggcataagtggacctatgattgagcgaatggctagatgaacatgatcgacgaaaatagtgttgttaccattaatcgtaaaaggaataaagaaacatagtatgcccactaaactatagacaaaaaaacgccatgcacttggttgttgtgcattagaatgatattgattcattaaagcaacccctttgtttaaatgaatacacaaaactgtatgatgcatcttccccttaatgagatgaatcattgttttaatttagaaaaatctgaaaacttactataattgtatagtttggattattttcagaccaatacaaattaactaattatatatagattgaaactatatagcttaataaaatatttatcttaaatgttgttgtgttgattcaacgtcacaattaaagtatttataaattatttgaggatacagatatttgtaaataattagtatcgatttaatatcgtattattaaatttttattaattttgtagtcttaatcaaaaaataatatatgtcatgttatattgaaagtgcagttgtttttcattctcaagaggggatcaaaaaaatacttttgaggtgattatatgttaagaggacaagaagaaagaaagtatagtattagaaagtattcaataggcgtggtgtcagtgttagcggctacaatgtttgttgtgacatcacatgaagcacaagcctcggaaaaaataccaacgactaatgcagcggcacaaaaagaaacactaaatcaaccgggagaacaagggaatgcgataacgtcacatcaaatgcagtcaggaaagcaattagacgatatgcataaagagaatggtaaaagtggaacagtgacagaaggtaaagatatgcttcaatcatcgaagcatcaatcaacacaaaatagtaaaataatcagaacgcaaaatgataatcaagtaaagcaagattctgaacgacaaggttctaaacagtcacatcaaaataatgcgactaacaaaactgaacgccaaaatgatcagattcaaaatacccatcatgctgaacgtaatggatcacaatcgacaacgtcacaatcgaatgatgttgataaatcacaaccatccattccggcacaaaaggtaataccaaatcatgataaagcagcaccaacttcaacaacacccccatctaatgataaaactgcacctaaatcaacaaaagaacaagatgcaaccacggacaaacatccaaatcaacaagatacacatcaacccgcgcatcaaatcatagatgcaaagcaagatgataatgttcatcaaagtaatcagaaaccacaagttggcgatttaagtaaacatatcgatggtcaaaattccccggagaaaccgacagataaaaatactgataataaacaactaatcaaagatgcgcttcaagcgcctaaaacacgttcgactacaaatgcagcagcagatgctaaaaaggttcgaccacttaaagcgaatcaagtacaaccacttaacaaatatccagttgtttttgtacatggatttttaggattagtaggcgataatgcacctgctttatacccaaattattggggtgggaataaatataaagttatcgaagaattgagaaagcaaggctataatgtacatcaagcaagtgttagtgcatttggtagcaactatgatcgtgctgtagaactttattattatatcaaaggtggtcgcgtagattatggcgcagcacatgcagctaaatacggacatgaacgctatggtaagacatataaaggaatcatgcctaattgggaacctggtaaaaaggtacatcttgtagggcatagtatgggtggtcaaacaattcgtttaatggaagagtttttaagaaatggtaacaaagaagaaattgcctatcataaagcgcatggtggagaaatatcaccattattcactggtggtcataacaatatggttgcatcaatcacaacattagcaacaccacataatggttcacaagcagctgataagtttggaaatacagaagctgttagaaaaatcatgttcgctttaaatcgatttatgggtaacaagtattcgaatatcgatttaggattaacgcaatggggctttaaacaattaccaaatgagagttacattgactatataaaacgcgttagtaaaagcaaaatttggacatcagacgataatgctgcgtatgatttaacgttaaatggctctgcaaaattgaacaacatgacaagtatgaatccaaatattacgtacacgacttatactggtgtatcatctcatactggtccattaggttatgaaaatcctgatttaggtacatttttcttaatggatacaacgagtagaattattggtcatgatgcaagagaagaatggcgtaaaaatgatggtgtcgtaccagtaatttcgtcattacatccgtccaatcaaccatttgttaatgttacgaatgatgaacctgccacacgaagaggtatctggcaagttaaaccaatcatacaaggatgggatcatgtcgattttatcggtgtagatttcctggatttcaagcgtaaaggtgcagaactcgccaacttctatacaggtattataaatgacttgttgcgtgttgaagcgactgaaagtaaaggaacacaattgaaagcaagttaaattcatattcgtaatttaatatgctatgtattttgtgctactaacatggcacggaagatataagtagcatcacagtgttgaattttaaaatagtaaagtgaaataaagcgcctgtctcattagcgaaaactaaagggacaggcgtatctgtttatgagcttaataaattgtatgaataatatggttgattgaataactgtttatcatgatgataaattgggtttttaaaaataatggtatattacgccgttgttatagcgtttaagaaatcaacaactttacgataaatagtgattgcttcgtcattaggtctacgatcaaaatcatgctcgtttttattcacgcgttcaaatgttgagtgtggcacatgattgtggatgtgttcgctttcttcaacagggacatcataatcgccattacaatgcgcaatgaacaccgggggaagtgttttaagttcatttggtgagatgttgtattttgaatcagtataatcagcaatgttaatcatattgatccactcacctgtaccacgtgcataaccgtagattaaaaaacgttgggcgatttgatcttgaataatcggtgttggtgaagtaagttgagcaagtactgtttcattcacactttgagctattttagcgtaatagctatttgccattttaaacggttcagtattgatgccactataaccataaaaatcaataacaccatcaatatctctgtctcgtgcaattaatagacttaaatatgcacctgatgatctgccaaaggtaaaaatagggcaattagaatattgtgattgaatcgcatcgaatgatgtgaagatgtcatcgatgatgcaatcaaggcttacttctggtaataaacgataacttagttgaattaaatcgtaatgttccgtaaggatatcgatatactgtggcgataaatcattggcctttccaaacattaaaccgccaccatgaatgtagacaatggcaccttttgttggttgatgcttcgctttaataattgtgtagggtaattcaaatgcatctttagtaattactttatctttaatttcagtcacgactatacagactccttatttttgaaattgatgtcattataacattgtcttaaatttctatgaaaaattatcttttgatgatgtgtcatgataattctgttctaattgacgtaaagcgtcacgggtatgcttctttagaccttccccataatccatcattttaacaatatctttaaaagcggcacgcggaatggctaaattttctaaatctgccatagaaaattcaaggtcaatatcatgtggtcgctgttcagaaagtttatgcacaaagtcaggttctgtgacaaaaggcgaagacatgccgaccatatctgcatgttgtaaagcatctaaagcagactctggagaattaatcccgccacttgcaattaaagggatgcgaccagctaaatgttcatagacaatttggttaactggccgaccgaaatgttcacctggtgtacgagacgtattttgataaatatgtcgaccccagctagcgattgctaaatattggatgtttgaaacgtccatgacccaatcgattaattgattgaactcgtcaatggtatatcctaaatcactacctctggtttcttctggcgttgctcgaaatcctaaaataaaattgtcaggtgcttctttatcaatcacttcttgtaccgcacgcataacttctaaacataatcttgcacgattttttaatgagtcggcaccgtaatggtctgtacgtttattcgaaaaagttgagaaaaatgtttgaatcagcaaacgttgtgcaatcgaaatttccacaccatcaaaacctgctttaatcgcgcgtaatgtagcatcgcgatactgctgaatgatgctattgattttctcatgagacatggcgataacatcgtgttcaatcggtgaatgcaacgtcataggacttggtccatacacctttccaaaatttaaaattgcttgatttgaaaaacgaccagcatgcgctagctgaataatagcgaggctaccatgttgtttcatcgtagatgccatgttagttaatccagggatacaagcatcatgatcaatattaaagccgtattcaaacaattgaccataaggttcaatgtaagcagcgccggtgacttgcataccagctgaattagagcgacgtgcagcataagccaagtctgcttttgtaatatagccttcttttgttgatgcgtttacggtcattggtgataatacaaagcgattcgaaattttgatgccattaggtaagtggattgattgtaaaagtggtttgtatcggtacatactatgattccttttctattcaatattgttttcaaagtaccatggaaagaatgaataatcaatgatgaacagtcttgatagaatagaattggtacatggaaagcatttttaaaattaaaattgaactaatgaatgtcatttgtaggtctgaaaatatgaatatgaaaaagaaaaatacaagcgaaaagatataaaagttaattgaaaaacgttatcatatacgtgggtatatgaagagggaatggtattaagaacgttaaaatgttatgtcggtttgatatgacaggataagtttggagatgacggattggttaaattaagcgtattagactatgccttaatagatgaaggtaaggatgcacaaaaggcgttgcaggattcagtgacacttgcaaaattagcagatcgacttggctttaagcgaatttggtttacagaacatcataatgtaccagcgtttgcgtgtagtagtccagaacttttgatgatgcatacattggcgcagacaaatcacatacgagttggttctggtggtgtgatgctgccgcactatcgaccttataaaattgctgagcattttagaatgatggcagcgttatatccaaatcgtattgatttaggtattggtaataatccgggtactactatggtaaagcaagctttagatggaataaatcctacatatgatagttacgatgaatcgatttcgttattacgtgattatcttacaataaaggataagccaagtgcgcatacgttaggtgtccaaccacacattgatcattttccagaaatgtggttattaagtagtagcgaaacatctgccaaaatagctgccgaactaggtatagggctttctgttggaacatttttgctaccagatataaatgcgatacatgcagcgaaggataacattgatatttacaaaaaatatttccaagcatcaacgattaaaatggacgcaaaggtgatggcatctgtatttgtcattgtagctgataacgaagcggaagtagcagcattacaacatgccttagatgtttggttattaggtaaattacaatttgcagaatttgaacattttccatcggtagacactgcgcaaaagtataagctcaatgatcgagacaaagagatgattcaagcacatcaagcacgtatcattgcaggtacacaagaacaggttaaagcacaattagatgatttcattgctacgtttgaagttgatgaggtgttagtagcaccgcttattccaggcattgaacagcgttgtaaaacattaaaattactcgcggaaatctatttgtagcattttaaatagaagagaaaggatgaagataagatgaaaaagttagccaattatttatgggtagaaaaagtaggagatttgtatgtgtttagtatgacacctgaattgcaagatgatattgggacagtaggttatgttgaattcgtgagtccagatgaagttaaagtggatgatgaaattgtgagtatcgaagcatcgaaaacggtcattgatgtgcaaacgccattgtcaggaacgattattgagcgaaatacaaaagcggaagaagaaccgacaattttaaactctgaaaaaccagaagaaaattggttgttcaaattggatgatgtcgataaagaagcattcctggcattaccggaggcttaaatggaaacgttaaaatcaaataaagcgagacttgaatatttaatcaatgatatgcgtcgagagagaaatgacaatgacgtattggtaatgccatcttcatttgaagatttgtgggaattatatcgaggtttagcaaatgtcaggccggcattacctgtaagtgatgaatatttagctgtacaagatgctatgttaagtgatttgaatcgtcaacatgttacggatttgaaagatttgaagccaataaaaggtgacaatatctttgtttggcaaggtgatatcacgacgttaaaaatcgatgcaattgttaatgctgcgaatagtcgctttctaggatgtatgcaagctaatcatgactgcattgataatattattcatacaaaagcgggtgttcaagttcgacttgattgtgcagagattattcgacaacaagggcgcaatgaaggtgtaggtaaagccaaaataacacgtggatataatttgccagcaaagtatataattcatacggttggtccgcaaatacgtcgattgcctgtttcaaagttgaatcaggacttgttagctaaatgctatttgagttgtcttaaattggctgatcaacaaagtttaaatcatatagcattttgctgtatatctacaggtgtatttgcttttcctcaagatgaagcagcagaaattgctgttcgaacagtagaaagctatctcaaagaaacaaattcaacattgaaagtcgtgttcaatgtatttacagataaggatttacaactatataaggaggcatttaaccgtgatgcagagtagtaaatggaatgcaatgtctcttttaatggatgacaagacaaagcaggctgaagtattgcgtactgcgattgatgaagcagatgcgatagtgattggaattggtgcaggcatgtctgcatctgacgggtttacatatgtaggagagcgttttacggaaaatttcccagattttattgaaaaatatcgcttctttgatatgttgcaagcgagtttacatccttatggcagttggcaagagtattgggcatttgagagtcgttttattacattaaactatttagatcaacctgtaggtcagtcttatctcgcattaaaatccttagtggaagataaacagtaccatatcataactacgaatgcagacaatgctttcgatgctgctgaatatgatatgacgcatgtatttcatatacaaggcgagtatatactacaacagtgtagtcagcattgtcatgctcaaacgtatcgcaatgatgatttaattcgtaaaatggttgttgcgcaacaagatatgcttataccttgggagatgattccaagatgtcccaaatgtgatgccccaatggaagtgaataaacgtaaagcggaagttggcatggttgaagatgctgaatttcatgcgcaactacaacgttataatgcttttctagagcaacataaagatgataaagtgttgtatttggaaattggaattggttatactacgccacaatttgtgaaacatccttttcagcgtatgacacgtaaaaatgaaaatgccctttatatgacgatgaataaaaaggcatatcgcattccgaattcaattcaagaacgtaccatacatttaactgaggatatctcaacattgattacaacagcactccggaacgatagcacaacgcaaaataacaacattggagagacaaaagatgtacttaatagaaccgattaggaatggagaatatattactgatggtgcgattgcactcgctatgcaagtttatgttaaccagaatatctttttagatgaagatattttattcccttattattgtgatccaaaagtggaaattggacgttttcaaaatactgctatagaagtgaatcaagattatatagataaacacagtattcaagtagttcgccgagatactggtggtggcgctgtgtatgttgataaaggtgccgttaatatgtgttgtattttagaacaagacacttcaatttatggtgattttcaacgattttatcaaccagctataaaggcgttgcatacattaggtgcaagagatgtgatacaaagcggtagaaatgatttaacattgaacggcaaaaaagtgtcaggcgccgcaatgacattaatgaacaatcgtatttatggcggttattcgctattacttgatgttaattatgaagcaatggataaagtgttaaagcctaatcgcaaaaagattgcatcgaaagggattaaatctgtgcgtgcacgtgttggtcatcttagagaagcactggatgaaaagtatagggatataaccattgaagaatttaaaaatttaatggtgacgcagattttgggaatcgatgacattaaagaggcgaaacgatatgaattatctgatgcagattgggaatcgattgaagaattggcgagtaaaaagtataaaaattgggattggaattatgggaagtcacctaaatatgaatataatcgaagtgaaagattatcatcaggtactgtagatattaccatttctgttgaacaaaatcgtattgcagattgtagaatttttggtgatttctttggacaaggtgatataaaagatgtggaacaagcattacaaggaacaaaaatgacaagagaagatttaacgcatcagttaaagcaattagacatcgtttattattttggtaatgttacggttgaatcattggttgagatgattttaagttaatattgtttaggtattaatgtcgcactctcgttgaacatgtgtatttgcttttaaaatggtgactatgtagttatgtgatttgaacatacgattgaaaatgaatttagttaattagcaaagacatcatatttatagcgtttgtgtttattagtgattgggtatttgaaaatggttaatgatagtttttaaaggaataaattcattttcatttatacaagtaagattaaataatagctaccaaagtctatttatatacgtcaaaatataatgactgctataatgaataatcaatagacacaaagaggagattatgtgatgaataataaagtattagtgaccggtggtactggttttgttggcatgcgaattatttcacgattattagaacaaggttatgaggtacaaacgacgatacgtgatttaagtaaagctgataaagtaattaaaacgatgcaagacaatggcatttccacagagcgattaatgtttgtcgaagcggatttatcacaagatgaacattgggatgaagcaatgaaagattgtaaatatgtgttgagtgtggcatctccggtgtttttcggtaaaacagacgatgcagaagtgatggcgaagcctgcaattgaaggtatacaacgtattttaagagctgcacaacatgcgggtgttaaacgtgtggtaatgactgcaaactttggtgcagttggttttagtaataaagataaaaattcaatcacaaatgaaagtcattggacaaatgaagatgaaccaggcttatcagtatatgaaaaatcaaaattgttagctgaaaaagcagcgtgggattttgttgagaatgaaaatacgacagtagaatttgccacaatcaatccagttgcaatttttggaccatcattagatgcacatgtttcaggaagctttcatttattagaaaatttattgaatggttcaatgaaacgtgtacctcaaattccattaaatgttgttgatgtgagagatgtagcagaactacacattttggcaatgaccaatgagcaagccagcggtaaacgatttattgcgacggctgatgggcaaattgatttattggaaattgcaaaattaattaaagaaaaacgacctgaaatagctcaaaaagttgctactaaaaaattgccagactttattttgagtctaggtgctaaatttaatcatcaagctaaagaaggtaaacttttattagatatgaaccgcaatgtaagtaacgaacgtgcaaaaacattacttggttgggaaccgattgcgacacaagaagaagcaattttagcagcaattgatagtatggctaaatttcatttaatataatacaaaaacaccgtccataagtaagtggctttcctcttgataaaaggggcattcactcaatatgtgacggtgttttatatttttacgttaacactattgctgtggcttttgacgaccttttaataaaattgctgttgcacctacgattataataaatagaatcgcaccaaataatcccatatattttactgcgttaccgaacacgataccgacagctaaaaagtctgtatctgagaatgttgttgcagcaccacctaattcgcctaaaaatggcaagaataataatggtaaaaacgttattaggataccatttagagcggcgccagcaacagcacctttaataccgcctcttgcattaccgaatacagcagccgttgcacctaagaagaagtgtgcaactacgccaggtaaaatgacgacgccaccaaataagaataagataaacataccgatgacacctgtaataaagctgacaaagaatccgattagtactgcattttgtgcataagggaacacaatagggcagtctaatgcaggtttagaatttggtacaagcttttctgaaatgcctttaaatgctgggacgatttcagctaagattaagcgaacgcccgttaaaataataaatacaccagcagcaaatgtcacaccttgaattaatgaaaatacaataaagttttgaccatcactaatagattcgtgtacataactaacgcccgcaaataagcatgcgatgaagtaaagtaatgccatcgtaatcgagatactaattgtactttctcgtaagaaacttaagccttttggaaatttaatctcttccgttgatttagacttacctttgaataattgacctacagcacctgcggcaaagtaactgattgagccaaaatgacctaacgctacttggtcattccctgtaatttttcgcatcgtaggttggagtaatgcaggtaagactgccatgattaatcctaatacgagtgcgccgataacaatcgttagccagcctttaatatgactgactgttaaaatgattgctaaaaacgcagccatgtaaaatgtatgatgacctgttaaaaagatatattttaaattagtgaagcgggcaattaaaatattaacaatcatgccacagaccatgatgagtgcagctgttgttccaaaatcttttaaggctagtgagacgatagcttcgttgttaggtacgataccttgcacaccgaatgcgtgttggaatattttgccgaatggctcaagagatcgaacgacgacatcagcacctgcacttaaaattaagaagcccaatatcgttttaatggttcctgaagtgattgttgcggcaggttttttctgaacgattaaacctataaaggcaatcagtgcaacaagaatggctggttgacttaaaatatcgactataaaattaaggattgcttgcataggtcgtacctcctttaaatcatgttaagttgttgtaatttttctgagagcttttgttgtaattcagctttgtctaaaatattatcaagaactaagacatcccctagacgttcggcattttcagctaaatctctaccacaaataaacaagtcagccatctctggacttgctgtcataatgtcgctatgttcaacttcgatatcagatggtgcattaagttgcctaagcgcttcttgtgcattcatttctaccataaaactacttcctaaaccgtggccacatactactaaaattttcatattaatcatgctcctttaaaatgtttttaatgtcttgtgcgtttgttgcagttaatagttgctggactgtttggttatcgcccagtacggttgctaaattttgtaatacagataagtgtgaatgattgtcgatggcactcaatacaaaaatgagtgatgcgtagtgatcttcatcacaaaatgccacatgttgattcaactttaatagacttaaaccaacttgatgtacgtcattgttcggtcttgcatgtgcaattgcaatttcaggtgcgataacgatataaggtccaagttcattaacgctatcaatcattgcttgaacatagccttgttcaataatttgttcttgtagtaatggctgagaagctatagttatagcttcagtccaatcatttacttgttcttttacaatgatgcgtgttgttgacaaaatgtctaatgacacgttattaaacctcctttgtcatagttaaagcaatgtgttgtttaattttaaaaatattcccatctaagaaatcttgtcgacataagtcgttgcttaagcattcgcttaactgtcccaatgcctttaaatgtgcattggggtggtccgttgctaatgtaattacaaggtgaacgggatcgttagctttactaccaaaaataatcccttcagtgaaataagttagtgcgaaacctacaccattctgtacataatcagtaccagcgtgaataagtgcaatgtgtggactaatgaccatatatgacccgaattgttctaattgttttaaaattgcagctgtataatttgaattgacaatgccatcattgattaaaggttgcacagccactgtaattgccgattcaattgataatggttgtttatttataatgatgcgatgttcaggcaataaatctgcgagtgacttgccatcagttgccattttcatgactcgttgttctcttgagtcattgataatttgattcaatttttgacgagattgctgattgataaatggatcgacatgaataactggtacagctgagatttcacaaggtactgttgaaatgacataatcaatgttatcttgcaataatcgactttcttccaattgataaatggaataggcatcccaaatgtgaaactcaggatacagatgatttagttttgattttaaaagttgcgacgtgcctataccagaaccacatagtaagacaaccttaatcattgattgtttatgtgttgcaacacgctctatacttgatgcgaagtgaattgtaatgtatgttaattcatcttcgttgaagcgaatagcagcatcttgttcaattgggctaatatgcttgctaacggcttcaatgatttgaggatagcgacgcataacttcttgcctcaaaggattaggttgtagcatatcgtatttaatacgatgtatagctggtttgatatgtgtgataagactggtatgcaacttgttgtcttttgacatatcaatgcctaattcttggctaacacaagtgatcaattcatgtatattttgcgataaatcatggtattcaaaggtaattgaagatgctgtatgttcggtcattttagagcctagtaaatgtaacgtgataaagataatttcagactctggaaatgtgacattacaactgcgttctaagttttctatcatttttgaagcaatagcatactgattagtatgtcgccatttatcaatttcattgataggtatatcgaacgaaaaattttcatttaaacgctgaatggcaatgcgtatatgatagattaagccatcgatagccgactgaactaaatgataattttcactatttaatgtcttaataatggcacggcgaactaatgcgattgattctgaattaaagatatcagcctctataaaaggtgcagcttgtttcatatattgatgtataaagtgtgcatacgctttacgataatgatcttcctcaccaataatattgaatcctttattgtggacataatttaactttaaatggtattgatctagttgggcttgaatcattttaatatcatctgcaattgtccgacgcgaaacattaacatcttgcgcaagttgctttgttgaaacaggatcagttgtttcgaataactttaaagcgatatgtgtgagtcgctcatcttttgaaaaatgaatttgattcgttagattgtgctctaattcatttaatatcgttgtgttagctgttgttactttgatgcctgcagctttattacggctgacttggtaatgataagtttcagcatattgctcaatatatgctatatcgtattgaatggtacgaggtgatacaccaagttgattagcaatggtattgattggaataaacgtttgctcatgaattaaaagatacaaaatttcaatgtgtctataacttaacaacgtaatatcctcctatttgtaattgtaagcgatttctcaagaacgtagatatgcaatctctttcatattttaatccgaaaaattgcatatcaaaatgtttatggcgcaagattttataggaacttttaaaataaattagatattcatgttgacaatttaaaaatggcgcagtatatttagttagacatctaacgaaatggtggtgcaataaatggaattcacttattcgtatttatttagaatgattagtcatgagatgaaacaaaaggctgatcaaaagttagagcaatttgatattacaaatgagcaagggcatacgttaggttatctttatgcacatcaacaagatgggctgacacaaaatgatattgctaaagcattacaacgaacaggtccaactgtcagtaatttattaaggaaccttgaacgtaaaaagctgatctatcgctatgtcgatgcacaggatacgagaagaaagaatataggactgactacctctgggattaaacttgtagaagcattcacttcgatatttgatgaaatggagcaaacactcgtatcgcagttatctgaagaagaaaatgaacagatgaaagcaaacttaactaaaatgttatctagtttacaataaatggtaagcgtgactggtagaaatcagtcactttatctttaatgttatagttagatatctaattgttagtaagctaattattggaaaagacaaggagtattgaacaatgaaagacgaacaattatattattttgagaaatcgccagtatttaaagcgatgatgcatttctcattgccaatgatgatagggactttattaagcgttatttatggcatattaaatatttactttataggatttttagaagatagccacatgatttctgctatctcactaacactgccagtatttgctatcttaatggggttgggtaatttatttggcgttggtgcaggaacttatatttcacgtttattaggtgcgaaagactatagtaagagtaaatttgtaagtagtttctctatttatggtggtattgcactaggacttatcgtaattttagttgctttaccattcagtgatcaaatcgcagcaattttaggggcgagaggtgaaacgttagctttaacaagtaattatttgaaagtaatgtttttaagtgcaccttttgtaattttgttcttcatattagaacaatttgcacgtgcaattggggcaccaatgatttctatgattggtatgttagctagtgtaggcttaaatattattttagatccaattttaatttttggttttgatttaaacgttgttggtgcagctttgggtactgcaatcagtaatgttgctgctgctctgttctttatcatttattttatgaaaaatagtgacgttgtgtcagttaatattaaacttgcgaaacctaataaagaaatgctttctgaaatctttaaaatcggtattcctgcatttttaatgagtatcttaatgggattcacaggattagttttaaatttatttttagcacattatggaaacttcgcgattgcaagttatggtatctcatttagacttgtgcaatttccagaacttattatcatgggcttatgtgaaggtgttgtaccattaattgcatataactttatgtcaaataaaggtcgtatgaaagacgttatcaaagcagttatcatgtctatcggcgttatatttgttgtatgtatgattgcggtatttacaattggacatcatatggtcggactatttactactgatcaagccattgttgagatggcgacatttattttgaaagtaacaatgacatcattgttattaaatggtataggtttcttgtttactggtatgcttcaagcaactggtcaaggtcgcggtgctacaattatggccattttacaaggtgtggttatcattccagtactatttattatgaatgctttgtttggactaacaggtgtcatttggtcattattaattgctgagtcactttgtgctttagcagcaatgttaatcgtctatttattacgtgatcgtttgacagttgatacatctgaattaatagaaggttaaatatttcgtacacttctggctgagtatatttcggtcggaagtgtatttttcaaataaaaaataaatatatgatacgattatgaaaaaataaagtgagattggcatatgtataaatctaaaatactgttgaaatatatttttagtgaagaatcagacgttaaagatttaacggaagaaaaatataatcaagattacgaagcattaacatttagctttaaagaggaaacatatcaaagtaggttagcaaagaaaacaccgactaaagcagggtattttgttacatgttggacaaaagacgagaacaattgtaatcaaccatactcaaaagaggcatttgcagattacttaatgattatagttattgatgaagaattaagcggttatttcttatttcctagggaattattggtagaaaaaggcatcttaactacatttgagcataaaggtaaaatggcttttagagtttatcctaagtggtgtaatcaattgaataaaagagcagagcaaacacaaaagtggcaatgtaaatatttttttgaatagttgatttgtcaatttaagtgcaacagttcatcacataaaacttcataaggaaacttccaatttaaacactttcttggtcgataattaattgagtctaatgcatagttaagttgctcttgatttactttagctaagtctgttttcttagggaaaaattctcttagtaaaccattggtattttcatttgtacctctttgccatgcggaatatggatcagcgaagtagacattaatattaaattggttttcaatattttgataacaagagaactctttccctctatcgacagtaatagttttaacggcacctttaggtagatgtttgataaggttattaattgccgtctccatagaattagaggaacgatcaggcataagtacacaataataataacgtgattttctttctgcgaaagtagcaatgcaccctttacttttgcctctgctggatacaattgtgtcagcttcccaatgaccgaatgtattacgtttctttatttccttaggacgttgtgaaataggacggccaatattaaacttacctctagtttctttaggtttctgtctttttcctttttgacgaaggcatgaaataagttcgaaattaatcatattagagttaatccatcgatagatggttttaaaacagatttggttttgtaatagacgacctacgatttgttcaggagaccagtggcattttaaataatatttaatgatattaccaagttctggagtaaatcgagtaggacgaccacaaagttttcttttggtttcataatttttttgagctgtttcagcttgatatgactgatttaaattattcctactaatttcacgtgagatagtagatacagatcgttttaatttacgtgcaatagatcttaaagaataattttcttgacgtaaaacctctatacgtgcgcgttcagttagtgtaagatggttatagctcatgttggcactccttgtatgtgtttttgtggttattaacatcttacaacaaagtgccaattatgggcattttttatgaatttttataggtgttgcacttaatattacaatccgtcaatactaattaaaaagtcatatggttgaacttataagagatgtatatatcatctttcgataagataaccatatgactttattttttatcatttaatgatgaacagtttcttgtcctactttattccaagtgaggataaagctcaacattgcaaacacactgattgctgttaataaaataaaaccgacatcccatccgaatttatcaactacagcacctaagacgatgttggccattacagcaccaaacagataaccaaataatccagttaatccagctgctgtgccagctgcttttttaggtacataatctaatgcttgtaaaccaattaacataactggtccatatattaagaaaccaatggcaattaatgagacattgtctaaccaagcattgcctggaggatttaaccaataaattaatacaaatactgtgacacctaacataaagaagaaaccagcaggtccacggcgacctttgaataatttatcagaaatgtaaccacataataatgtaccaggaattccagcccattcgtataagaagtatgcccaacctgatgcttttaagtcgaaatgtttttcttcacttaagtagactggcgcccaatcaagtacaccataacgcacgaaataaacaaatatatttgcaaaggcaattgcccatacccatttattgttcagtacatatttaaataaaatttcttttgtagttaattctgtttctaatgttttcttatcgcttgtagcaaagtcatttttataaatttcgattggaggtaaaccttgagattgaggtgtgtctctaatcaatatatatgaaattgcggcaatgataagtgctaagagtgcagggtaaatgaatacaccttcaaaaccttttaaataaccaaagttgataaatgctgttgttgtaataccccaagcagcaataggtgccataatacctccaccaacattatgcgcaacgttccaaagagcagtcttacttccgcgttcacttacactaaaccagtgaacgagaacacggcctgaaggtggccagcccataccttgaaaccatccatttaagaataataggacaaacataataccgatacctgatgtaaagaacggtacaaatcccattaacaaattgacgatagcagtgagtactaatccaagaactaagaatatccgtgcattgctccgatcacttacagtacccataaagaacttactaaatccatatgcgatggaaacagcagaaagcgcaaaacctagttctgcttttgtaaaaccttgctcttgcaatgccggcatcgctaatgaaaagtttttacgtaataaatagtacccagcgtaaccgatgaaaataccaagaaatacttggagacgtaatcgtttataggtatcatctatctgattttctggcaaaggcttaatatgctttgcaggtttaagaaaattcataaaatcctccttaatatgtatttatatgcattttgtgcgataaacttatattagacatgtatgaaagcgttgtcaatatacttttatgaaatcttacatatttagttattgaagtattttataaacatttagaaaaaataaattgctacacataaatttataattatgcaattattatgtcgttatacatactagctgtgtatctacgaaggagcgcaaacatatttttatttgcagaaaagggctaaatggcatataactatcttttttatataagttggtataaaatttatactaataggagggatagtatgaatatagtagggcatcatcacatatccatgtatacaaaagatgcaaaacgtaataaggatttttacacaaatgtccttggattacgattggttgaaaagtcggttaatcaagacaatccttcaatgtatcatttgttttatggggacgaagtaggtacagccggaacaattttaagtttttttgaaattcccaatgcgggtcataagcagccaggtactgaaacgatttatcgattttcattattagtaccaaatcaagcggcacttcattattttgaaaaacgtcttgagaataatggtattaagtctgaacgtttgtactatcttggacaagaaggtgttgtttttaaagatgaagacgacttagaaatcatactgcttgttaatgatagttttgaagtaccacatcaatggcaacataacgcttatagtgaaatacctcaagcatatcaaattttaggaatagggccagtcgaattaagagttagaaatgcagcgcgtacggtagaatttttggaaaatgtcttaggttatcgcaaaagagataataaatcattcgatgtgctgacattagcaccacaaggtttatattcggattttgtagttattgagcaacagggacaacgtgaaagacctggacgaggttatatccatcatattgcagttaatacaccacaaatgaatgacttagatgcaatttacaagaaactacaacaacaaccacaaagtaattcaggtataattgatcgctatttctttaaatcattatactatcgccataattcaattatgtatgaatttgcgactgaagcgcctggatttactattgatacacctgttgaacaattaggaagtcaattgaacttgcctgactttttagaagcagaacgtgaacaaattgaaagtaagttacacgaaatataaaggagaatgtttaatggcaaaattagaaatgaataaaaatacgcctcttgagtttggtttgtattccttaggtgatcatttattgaatccatttaaaggtgaaaaagttagttatgagcaacgtattaatgaaattattgaagcaagtaaattagcagatgaagcgggtattgatgtttttgcagttggtgaaagtcatcaggaacattttacgacacaggcacatacggttgtgttaggtgcaattgcccaagcgacaaagcatattaaagtttcaagttcttcaacgattattagtgcaacagatcctgtaagagtatttgaagacttcgcgacattagatttgatttctcatggtagagccgaaattgtagctggcagagcatcaagaacaggtgtttttgacttgtttggctatgatttaaaagactatgatgaattgtttgaagaaaaattaggtttacttttagagttaaataaaactgagcgtattacttggtctggaaaatatcgtccagaacttagaaatatgaaaatattcccaagaccaatcgataatacattgccaatatggcgtgctgttggtggtccacctgcaagtgctatcaaagcgggaaaacaaggtgtgccaatgatgattacaacccttggtggcccagcaatgaactttaaaggttctatagatgcttatcgtcaagcagcaactgaagcaggtttcgatgcttcgcctaagtctttaccagtaagtacagcgagtctgttttatacagctaaaacaactcaggatgctatgagagaattttatccacatttgaatacagggatgtcatttattcgtggcgttggttatccgaaacagcaatttgctaattcgtcagattatcgagaagcgctaatggttggaagcccgcaacaaattattgaaaagatattgtatcaacacgagttatatggtcatcaacgttttatggcacagcttgattttggcggtgtgccatttgaaaatgttatgaagaatattgagttaattggcaacgacattataccagcgattaaaaagcatttatcaaaataggaggggcgacatcatgaatattgtattattgtcaggctccacagtaggttctaaaacgagaattgctatggatgatttaaaaaatgaactagaagtcatcaatgagggacaccaaatagcattgatggatttacgagatctcgaattataatttagtgttggaaagaattatctagatactacaggagatgtatataaattaacgacgtcgttaatgcaggctgatgtgatttttattggttttccaatttttcaagcttccatccctggttctttgaaaaatgtgtttgatttacttccagtcaatgcgtttcatgataaggtaataggacttgtagcgacagcaggttctagtaaacattatttaattcctgaaatgcatttaaaaccaatattgagttacatgaaagcacatacgatgcaaacgtatgtattcattgaagagaaagacttttcaaatcaacaaattgtcaatgatgatgttgtatttcgtttaaaagcgttggcacaatccacaatgcgaactgccaaagtacaacaacaagtgcttgaagaagaaaataaccaatacgacttttaaagtataaaaataagacgctcggcacactaaatttgtaagtgtttgagcgtcttttcatattaactatatagccagtgaacgacgataaaggcaagtgatgacaagcatattgaggtaataatgattgtcataagcggtttaagtgcacgatttttaagatctttaaatgcaacatttaatcctaaagcaaccatggccattaataagcagattgttgatacagtatttaaaatatttaacaatactgacgggatagttacatatgtattcactaaggccataatgacaaatccaattaaaaagtatggaatgcttattcgacccttgctagatgattctgatgaacggaagcgcataattaaaataagtacgatggttaatggaatcagtaagaatactctaccaagtttaccaagaagtgcgattttaagtgcatcactaccaccaaagccaccagctaagacaacgtgtgcaatttcatgaagactaacgccagaccaagcgccataaacatttgtcgtcattgaaaagatagcatagatagctgtatatataagtgaaaatatcgtaccaatcaatgcgatgataccgatactaatagctgtatctttttcacgtgatttgaatattggagctactgcagcaatagcggcagcaccacaaacgcctgtacctacacctagtaataatgcgatgtttttgtcaccacgcaacagtttgttgacaaagagcatcattacaatactgaaaataacgacacctacatcgatggctaatagtctactaccttgaccgataatatcgaatatattgagtttaagtccatataggatgattgcaaatcttaataaatatttggatgaaaatgtaatacctgagctatattgttcaggatatcctttaaagtgacgatacagaatagcgattaatatcgcgatagttaatgcgccaaccttatctaagattggcaatttagctgctaaaaagctaaataatgcgactataaatgttaatgatagtccaatcataaaatgcttatttttcaatgatgccatgagcagtgcctcctttaatagcattttagcactgttttgtcgtatttttaaatataaatttggaatggttaataaagtagtgattaaattaagttgtgtgataggtatcaagggcatcaaccaaagtaataggcactacaatgcttattgtcgaggccccaacatagagaatttcgaaaagaaattctacaaacagtgcaagttggcggggccccaacatagagaatttcgaaaagaaattctacaaacaatgcaagttggggaaggacaacaaatttaagatacaaggcgtaatattaatatgttattattatgataatttacagaattatatgaaaaataaatgagggtgtgatggtatgtttggaatgaaagtgaatgaacaaataagattaaaaattttagaagcccatgacacagaagcgcttttcaatttagtcaatcgttcaagaaattcacttagggaatggttaccttgggtagatgcaaccgagcaaccatcagatacgcgtgcatttattaaaagtggacttttgcaatttgctgatggtaatggatttcagtgtggcatttggtatgaaggaacgctagttggtgtcatcggtttacatgaaattaatcacatgcacagaaaaacttcattagggtattatttagataaacaatttgagggtcatgggattatgacacaagcagttgaggcattgataaagtattgcttcgatgagattgaattaaatcgaattgagatcagtgccgcagttaataatgaaaaaagccaagctattcctgaaaggctgggatttactagggaaggtatgttacgtgacaatgaattactaaatggtatttattcatcgagttacatctatagtttattaaaatcagaatataatgaaggatgataaatcagactacaaaagagtgatgacttacatataagtgttactcttttatttattttcaaactaaaaaggttgttgacagtattattttataacaatataataattttgataattattatcaactagataatgttcatgggaggatgccttaaaatcatcattttaagagccacgtattatcttggcatttagggagtgtgagatagtacgaatgagagcatgtctatggggataatagaatttctataatgaggtgtcaaaatgaaaaagttaacaacgctattattagcatcaacgttattaattgctgcatgtgggaacgacgatagtaagaaggatgattcaaagacatcgaaaaaagatgatggtgttaaagcagaattaaaacaagcaacaaaagcatatgataaatatactgatgaacagttaaatgaatttttaaaaggtacagaaaaatttgttaaagcgattgaaaataatgatatggcccaagcaaaagcgttatatccaaaagttcgtatgtattatgaacgctctgaaccagttgcagaagcatttggagatttagatcctaaaattgatgcacgtcttgcagatatgaaagaagagaaaaaggaaaaagaatggtcaggatatcataagattgaaaaagcattatacgaagataagaaaattgatgatgtgactaaaaaagacgcacaacaattattgaaagatgcaaaagaattgcatgccaaagctgatacattagatatcacaccaaaattaatgttacaaggttctgttgacctattaaatgaagttgcaacttctaaaatcacaggtgaagaagaaatttattcacatacagatttatatgattttaaagcgaacgttgaaggcgcacaaaaaatttatgacttatttaaacctattttagagaaaaaagataaaaaattaagtgatgatattcaaatgaacttcgataaagtgaataaattattggataagtataaagataacaacggcggttatgagtcatttgaaaaagtatcgaagaaagaccgtaaagcatttgcggatgctgttaatgcattaggagagccactaagtaaaatggctgtgattactgaatgacaaattatgaacaagttaacgatagtacgcaattttcaagacgtacatttttgaaaatgttaggtattggcggtgccggtgttgcaattggcgcaagtggtgttggtagcatgtggtctttcaaatcaatgttcaatacaccagaagatccggaaaaagatgcgtatgaattttatggtaaagtgcaatcaggcattactacacccacgcaaaaaacatgcaatttcgttgcattagatttgaagtcaaaagatagagatgcaattaaggcaatgtttaaaaagtggacggttatggctgatcgtatgatggatggtgatacagttggcaagccgagtaacaatcctttaatgccgccagtagatactggtgaatcgattggattaggtgcaagcaagttaacgattacctttggaattagtaagtctttgatgaagaaaattgggttatctagtaaaattcccgatgcctttaaagatttaccgcattttccgaatgatcagttaatagacgattacagcgatggtgatattatgattcaagcatgctcaaatgattcgcaagtatcctttcatgcggttcataatttagttcgtccatttcgagatattgttaaggtacgttgggcgcaatctggttttatctctgctaaaggtaaggaaacacctagaaatttaatggcatttaaagatggaacaattaatcctagaaagagtaatcaacttaaagattatgtgtttattgatgacggatgggcgaaacatggaacttattgtgttgtcagacgtattcaaatacacattgaaacgtgggatcgtactgcactggaagaacaagaggctacatttggtcgcaagcgacatagtggtgcaccgttaacaggtgggaaagagtttgatgaaattgacttaaaacgaaagatagtcatggcgagtatattattgataaagatgcccatacgagactagcgaaagaagcaaatacgtcaattttacgtagagcctttaattatgttgatggtacggatgaccgcacaggtaacttcgaaacaggcttgttgttcattgcttttcaaaaagcgacccaacaatttatcgatattcaaaacaatttaggtagtaatgataagttaaatgaatacattacacatagaggttctgcttcatttttagtattaccaggtgttagtaagggaggataccttggtgaaacattatttgactaaaattatagcgacgataattactttagttatggtatttagctttgggttattgaaaagtcaggcagcagaacaacaaagtattagtgatgtatatagtgtgataacggatgcaaaatctgcactttctaataattcgatatcgaaagacaataagctgaaagcaattgagcaagtggtaagtgcagttaagaaattatcgcttgaagataatagcgaaggtaatgctgtcaaatcaaatgtgagaaagcttgaagatgcaaaagcgaatgatgatcaaaaagatacactttcgcaattaacgaagtcattaattgcttatgaagagaaattggctagtaaagatgcgggttctaaaattaaactgttgcaacagcaagtcgatgccaaagatgcagcgatgacaaaagcgattaaagacaaaaataaagcggaattagaatctttgaacaatagtttaaatcagatttggactagtaatgaaacagtgattcgcaattatgacgcaaatcaatatggacaaattgaagtcgcattattacaacttagaattgcaattcataagtcaccattagatacggcaaaagtgtcacatgcttggacaacttttaaatcaaatattgatcatgtcgataagaaaagtggtacgtctgcaaatgatcaataccatgtatcacaattaaatgatgagttagagaaggcgattaaagctatcgacaacaatcaattgtcggatgctgatgctgcgcttacacattttatagaaatttggccatatgttgaaggtcaaattcaaactaaagacggtgctttgtatacgaaaattgaagataaaataccatattatcaaagtgtattagacgaacataataaagcacatgtcaaagatggtttagtagatataaacaatcaaattaaagaggttgttggccatagttatagcttcgtcgatgtgatgattatctttttacgtgaaggactagaagtgttattaattgtaatgacattgactactatgacgcgtaatgtcaaagataagaagggtactgcaagtgtgattggtggtgcaattgccggacttgtattgagtatcgttttagcaattacattcgtagaaacactagggaatagcggtatgcttcgtgagagtatggaagcgggattaggtatcgttgcggtcatattaatgtttatcgttggtgtttggatgcataaacgttcgaatgcgaaacgctggaatgatatgattaaaaatatgtataccaatgcgattagtaatggtaatttggtattgttagcgacgattggtttaatatctgtgttgcgtgaaggtgttgaggttatcattttctatatggggatgataggcgaattagcgaccaaagattttgtcataggtattgccttggccatcgtgatattaattgtctttgcgctattatttagatttatcgtcagattgatacctatattctatatatttagagtattgtcgatctttatttttattatgggattcaaaatgcttggcgtaagtattcaaaagttacaattattaggtgcgatgccaagacatgttattgaaggattcccaacgattaactggttaggattctatccaagttacgaaccattgatagcacaagctgcctatattatggtagttgctatcttaatctttaaatttaaaaaataaaaaacaggccgagtgcctgttttttttgttgctgtattgtggatatcgaagcattgcagatatcgccgcattgttgaggtgcggattatcttagcattgtggatatcgcggcattgttgaggtgcggatatcactgcattgttggttctcgttgtattgcagatatcgaagcattgttggttctcgttgcattgcggatatcacggtgtaatccgatgctgtattctgattaacgcaatgttagttagctgcagtattgatataatctgaggtgctacattgttcttttattggctattgtgatgttgttgcattgtgagtattgcagtattgattcgtataaggtcattgcgacgataagtcatttcgactggtgaatttaacgatgaacatactgaactcaaagagcaatatgagtggcaatgtgagtaatatatttaatgttatgtctggtggtgcaatgatactcgccagcacaaagcaagcaaaataaatatatttacgataatgtttcaaagaatatgtatctataagatcgaattttgcaagacccataaataatattggtaattgaaatagaatgccaaatgtaaataaccaacgtatgagttcaatcaaatatgctttaaagccaataacaggcgaaatgtttaaagttaatgataattttaacgcgaattgaatgatcattggaaagccaacataaaatgcaaaagcgacgccagcacagaataataacacgctgaaaaaactatatttataaataaattgacgttcattattatgtaatccaggtgcaatgaatgcccataattgataaaacatgactggtgaaatgaaacaaaatgcgatgaaaaatataatcatcacgtatatttggatcatttctgtgaatgaaaatgcatgtaaggacacatgtgcacgggtaatatacgttatgaatggtgtcatccaccaaaatgatgaaacatatacgacgatgaccgcaatgacgaacgacaataaaatttttactaaccgttggcgtagttcgctaaagtgaaccattaatgtatcatcagtgctattgctctcgctgttgcttcgattccttactgggtgtatcgtgagactctttatctaaatcttctgtagcagatttaaattcttttaaagtagaaccgatagcacgaccaaattgtggtaattttttcggaccaaaaataattaaagcgataatgctaatgacgacaagacttgttggacctgtgatgcctaaaataaaagtgttagttatcatgataatcaacctcactcataagtagtatatagtatttactttataccgaacgataatgattatcaacaaattttatataataattaaaatattgctataaacacaacttactgaggtattaattctgaaataatagcttgttcttgcaagtcgatataagtacaagtaccagcttgaatatcgatatgccatttataaatgccagcttgagccatttcatcacaaaatgtttcgaaatctgtttgtccttgttgatgtctagttaatacatcttgaacgatagattgatttgaacttggagcgacaggatgattactttttacagatgacgtaacgatatcatcttctgattgatgtacgtatgttgctgtgccatcttgaatattgacgatattgtaagtcatccccatatctttaaaagccttgaatagttttggaaaatcaacaccagtaaattgttgatgtgcttgttgaattgcagataatttaaatgccataataatctcctttgaatggtttgatttagtgaaaatgcgtgcatcatactaaaattagaatgctgttaattatgcaggaaggtgtaacgaaagtaaacaattatgacttgtaggtgttgaggtgtgtgtttcaaaatgtcatacataggtggacacttatattttttgtgtagatttgacaaatatagttgtcaaaaagacaattatcatttacagtgtagttgaggagttgatgcgatgtgcgtaatcgattgaaagaattacgagcacgagatggcttaaaccaaacgcagcttgctaaacaagcgggtgtttcaagacaaactatttcgctaattgagcgaaacaactttatgccatcggtattaactgcaataaagattgctcgtatcttcaatgaaaaggtggaaactatttttattattgaggaggatgaggtttgaaaatactaagatatatcggatatcttttactaggtggacttgtaggtggtatcataggtggaattttaggtaactttgatggattgggtattgagaatttgacgttcgcaacgcataacaatgtcgttgtaatatcaattattgcgactataatcatcatattaatagaaatcattgttttgatgaatcaaagacgtgcattgaagtataagcgacttgtagatgaagaggtagataacgaagaaacagatcaatatgaattgcttgcgaatcgtcatgttttaaatggaagtatattaagtattctacagacagttattgccttgttagtgttgcttatttttgtggtaggacaagctgaagtaaatggaatactattatttttaataccattttttgctagtgctattttcaatacacaatttacgctgtttaatagaagatttgatgatagaatgccaaaaattgcagataagaattacactgaaaagcgattggaaatattggatgaaggtgaacaccatatagaattaattgcattatttaaaacatatgcaatcaacttatccatattgatactagccattatttttatagggtcttattcaattgctacaggaattaatcaaagctttagtttgctacttatcattgctattttcatatataacgcctttagttatttattgaagagaagacgtttttattaaaattaaacaaagaggagcatggatatgacaacattgttaaacttagatcgtgtgaacaaacaatacaagtcttcggattttaaattacaagatgcatctttaacgatttctaccaatgagacagttggattaattgggaaaaatggctcaggtaaatcgacattaattaatattctagtaggcaatcgacataaagataacggtagtatcacattttttggggaagaacatgctattgatgatgtcgaatataaagaacacataggtgtagtgtttgatgatttgagagtacctaataaattgactattaaagatattgataaagtatttcaatctatttatatgacttggaatagtcaaaaattctttgatttaatcaaatatttcgagttgccactacaaactaaaattaaaactttttcaagagggatgcgaatgaagatagctttgacgattgcgctttctcatgatgtgaagctattgatcttagatgaagcaactgcgggtatggatgtttctggacgagaagaagtaatggaactattagaagattttgtcgcgcaaggtggaggcatcttaatatcatctcatatttctgaagatatagaacaattagcggataaattagtgtttatgaaagatggacgaatgattttaactgaacagaaagatatacttttagcacaatatggaattgttacgacagaagataaagatgttgaaattcctaagcatttaatcattgcttctagattatcgaaggggaaatatcaaattttagttaaagattatgcagaaattgaaaatgcagaacctttaaaacacattgatgacgctacgaaaatcataatgcgaggtgaagtataatgaaaggtatgttcctaagtagtttttatgcaacgagaaagcaaacatatatttattttatagtcgctatcatagctgcgggatactttgcagtatttaatccgttgatgagttcggcaatggctggggttatgttaattacacctattactgataatattaaacatgaaaaagactcaagatggatgtattatgtatctactttaccggttaaacgtagtgattatattaagtcatactttgccttttatttaatcttattcggtgcaagtttaatgattggattagttgtgactacgattgtgacccaaagtgtgatgattggtattatgtcaggtttaatgagttttggtatcataggggcatactctatcattttcccattgacatttaaatttggcgctgaaaactccaatgtcattatgatatgtgcatctatactactacttatttctttcgtggtctttttctttatatatggtatggttagtggtgcatctgcattagaatttgaaaaaattagcactggaggatggctagttgtcatagtatatgcggttatcggtatagttataacaagtgtttcttatatatcgtctattaaaatttttaacaaacaagaactataatcaatattcttggtgtgaagctagtcattgaaataatatttagagcaggtgataaatctttacgattgtcatctgttctttttggtgtggaatgaaatgcggggtgataagtataggtgacatatctagattgatttatttgttttgaggtggttatgttgtgagggaattatttccttttagatagtgggggttagagaatatatgttatttatgagtatcatttgatgattgtataggctaacgatttcctcggaaatatttaaaaacctcgatcatgtatcataactgaagtttgtcacaaagtataatgtgaagttcgacacttttggattcagttcaaatactttgaccgaggtaaatactatttattcatgtttattacgtagacgttgatttttaaaataaatcagcatgatacagaaggttgcaactgatactgagataatcattacatggtcgtgacctttaaataaaaggctgacaatataagacataacgagtatccctagtgaatatgaaatatacttcgcatttgtcaattcgttatggaaataaggcgtgattaaccataatccaatatagaatattaaaacactgatatacatcatattaatttcaaacaagtcatttaatttattgttattactaaaaacaattgcggcattaatcacacctaaagcgatattgattaataaatgcgtatacgataaacggaaaccgatagatgacaatttatgattaatgtaattttcagtaatgatccaatatacaccgaaaagactaattaaaatcataaattggaatatataaatgtaactaaaatgatcaatgctaaatgatgacgaagctaaaccaaccagtacctcgccaaagatgataattgtcagtaatgaaaaacgttctactaaatgcatcatattaacaggtgataatacgagatatttttgaaatggaataagtcctgtcgatgcaatgaatacgcctaaaaatccagggatgtaatggatactttgtggtagtactaatgatagaaatgataaaaatgaaatcacaaaggctacggtcgcaaaagcttgacatgtacgcttatcgccataatctaatcctgtacgtatatgtaataaatactgtaatccgatacttaaatacataattgccacgcataagaagaatgggaagaatgtcttttcaaagtccggatataggctgttagataggaagaccatgataaacatattaaacatcataaacgagacgtctttgaatgtaacttgaccaaatcgatttgtaaaaaatgtttgatgagaccacattaaccataagaacaaactcatgacgatgtatttgaaaaataaatcagctgaaatggaaccattttgtgttgttaaaatcacatgtgcaattttttgaatggcatagacgaaaattaaatcaaagaacaactcatggaatcctgcacgcttttcagctaaatgttttggtgttaatgcattaaccataaaattttaactcctttaaggtgtgtaattaatttactaagtatactatttattttttctagtgaataggggcagatttgacgatgaaatggaaggaggggtgacagggagctggttgcggcattaacagttatcagcgatttaatatttgaatagagacgtcatggtttgaaaaagtagatggtgaaattgatggtgaaacaagctgtgaatagcgatgcaatgatagatagcatttaattagagtcattacgcgaaatgattaatgataatttgtggtaaatcaaagcataattttgtactatagatgaggatgatagagcatatttaagagtgtgaaatgttaaagtgaaaccgtttacgtttccgattgcccaaacaaattacatcattgtataatatgatttgttaaatgcataacaagaatgaaaatgtaacatacgtagcaattggtttcataaattggatgttagtggcgtattggttcattagacgtattagtaataaaattgtatatatcataaggagatgaatatgacatgacgagagtcgtattagcagcagcatacaggacacctattggcgtttttggaggtgcgtttaaagacgtgccagcctatgatttaggtgcgactttaatagaacatattattaaagagacgggtttgaatccaagtgagattaatgaagtcatcatcggtaacgtactacaagcaggacaaggacaaaatccagcacgaattgctgctatgaaaggtggcttgccagaaacagtacctgcatttacagtgaataaagtatgtggttctgggttaaagtcgattcaattagcatatcaatctattgtgactggtgaaaatgacatcgtgctagctggcggtatggagaatatgtctcaatcaccaatgcttgtcaacaacagtcgctttggttttaaaatgggacatcaatcaatggttgatagcatggtatatgatggtttaacagatgtatttaatcaatatcatatgggtattactgctgaaaatttagtagagcaatatggtatttcaagagaagaacaagatacatttgctgtaaactcacaacaaaaagcagtacgtgcacagcaaaatggtgaatttgatagtgaaatagttccagtatcgattcctcaacgtaaaggtgaaccaatcgttgtcactaaggatgaaggtgtacgtgaaaatgtatcagttgaaaaattaagtcgcttaagaccagctttcaaaaaagacggtacagttacagcaggtaatgcatcaggaatcaatgatggtgctgcgatgatgttagtcatgtcagaagacaaagctaaagaattaaatatcgaaccattggcagtgcttgatggctttggaagtcatggtgtagatcctgctattatgggtattgccccagttgacgctgttgaaaaggctttgaaacgtagtaaaaaagaattaagtgatattgatgtatttgaattaaatgaagcatttgcagcacaatcattagctgttgatcgtgaattaaaattacctcctgaaaaggtgaatgttaaaggtggcgctattgcattaggacatcctattggtgcatctggtgctagagttttagtgacattattgcatcaactgaatgatgaagttgaaactggtttaacatcattgtgtattggtggcggtcaagctatcgctgcagttgtatcaaagtataaataataagaaaacaggttatcacaacagtattaattacatgttggcataacctgtttttatttgtttatggatttattgggtaatattagtcatttgatggtttaattgcaaatgctctaacagggaacccaggtgcatcttttggtttagggctgatagcgtaaatgatggcgccacgagttggtaattgatctaaattagttaataactcgacttggtatttatcctgaccaagaatataacgttcgccaactaaatcaccattttttacaacgtccacagatgcatcggtatcgaatgtttcatgaccaacagcttcaacacggcgttcttcaattaagcacttcaaagcatctaatccccaacccggtgcatgttgttgtccgttcgcatctttgttttcaaacgtttcaatattaggccaacgttttgaccaatcggtacgaagtgcaacaaaagtgccaggttcaatagtaccatgctctttttcccatgcttctatatgcgcacgtgttacgatgaaatcattgttgttcgctacttctgttgaaaagtctaatacaattaacggcaataccaattcttttaaatcaatgtcttctaaataacgtttattctcgacaaagtgaattggtgcatcaatgtgagtaccatattgcgttacaatattccaacgttgcacatagaaaccatgatctttaaccgtgaataaagttgaaacttcgcctttttcaaactcactaaaacgtggtatttccggatcaaacgtatgcgttaaatcaacccaagttgcttgttttaaagtatttaattgttgccataaaggatattgtgtcataaaatcacccgtttttagtttattatatgataaatgctgcgattattcttggcgtttagctttaacagcattcacaagcacagtcaatgcatctttaacttcttcttcttttcgcgttttcaaaccacagtcagggtttacccagaataatgagcggtcgatttgttgtagtgaacgattgattgctgtagtaatttcttcttttgttggaatacgtggactatgaatatcatatacacctagaccaatacctaaatcataattaatatcttcaaagtctttaattaaatcaccatggctacgagatgtttcaattgaaataacatcagcatctaagtcatgaatagcatgaatgatttgaccgaattgagaataacacatatgtgtatggatttgagtttcatcacgaactgaagacgttgcaagtttaaatgataaaacagcatctttaagatattgttcgtgatattcagagcgtaatggtaagccttcacgtaatgcaggttcgtcaacttggataactttgattcctgcagcttcaagtgctaatacttcttcgttgattgctaaagcaatttgatcttgaacaactttacgtggtaaatcaacacgttcaaatgaccagtttagaattgttacaggtccagttaacatacctttaactggtttatctgttaagctttgtgcataaactgtttcatcaacagttaaaggcgctgtccattttacatcaccataaatgattggtggttttacggcacgtgaaccatatgattgcacccaaccgaatttagttactaggaaaccttgtaatttttctccgaagaattcaaccatgtcattacgttcaaattcaccgtgaactaatacatctaagccgatgtcttcttgaattttaatccatcgagcaatttcattttttaagaatgtttcatatgcttcgtctgtaatgcgtttgtttttccaatctgcacggtattttcgaacttctcggctttgtgggaatgatccaatagttgttgttggtaaatccggtaagttcaaacgtttttgttgttgttcaatacgttgcgcgaatggtgattgtcttgaagtacgcacgctttcgaaatcataatctaagtttttgaatgattgattttggaaacgctcataacgtgcttttaatttatcatatttaacactatcgttttgattaaataggcgacgcaatgcatctaattcgtctaatttttcagttgcaaagcttaagccttcgccaacacttgtatctaatgtttcatcatctaaagatactggaacatgtaataatgaagatgatggttgaatgacaagttcattagtgtgtgctaacaatttatcgattaagacttttttagcttcaatgtcacttgcccatacattacgaccatcaataattccagcatataatgtttttgatttatcaaaatctccagcttcaatttgtttaaggttatagccattatcatggacaaagtctaatcctaaaccaccaacaggtaaagaacttaagaatttaagatgtgcacgttcgaagtatgtttgaatgactaattttttagcaacaccagctttttcgaaatagtcataagcttcacgtgtaatattttcatagctttcactgtcgtctgtaactaagattggctcatcaacttgaatgtactcagcacctgcatcaattaatgattcaaacacttctttataaagtggtaataacgttttaactttttcttcaaaagtttggtgaccgccttttgataatttaacaaaagtaatcggaccaacaataacagggtgagcattaacatttaaagattgcgcgtatttaaagcgatctaataatacattgcgactcactttaggctcaacattgtcccattcaggtacgatgtaatgatagttagtgttaaaccattttataagtgcacttgcaacatggtctttattaccgcgagctatatcaaataataagtcatcatcgatagttcttccttggaaacgttctgggatgatgttgaataataatgacgtatctaaaatgtggtcatataaagagaaatcaccaactgggatgctatctaagtgatagtacttttgtaataataaattttctttatgtagatcagttaatgtttgatctaattcttctttagaaatcttctttgcccaataactttcgatggcttttttccattctctttttctacctaatcttgggaatcctaagtttgatgttttaattgttgtcataatattgcctccttgtgagcagtaatagattttgagtatgctgcaagttctaatgaatcttcgacattttgaaacggtgtgataatgtataaaccattaaaatattcatgaacagtatcgattaaatcctttgaaagcttaaggcttagttcacgagttttggctttatcatctttaactgcttcaaattgttgtaaaatttcatctgacatcttgattcctggcacttcattatgcaaaaagagtgcgtttttgtaacttgcgataggcataatgcctatgaaaaatggtttgttcaagtgcttagtggcatggtaaatttcaatgattttctctttgctgtacacgggttgtgttataaaataagacattccgctttctatctttttctctagtcgttttacggcaccatctaatttacgaacattagggttaaaggcgccagcgatgttgaagtgtgtacgtttcttcagcgcatcaccgtcagtgttaataccttgattaaatcttagagcgagttcagttaatcctttagaattaacatcatagacattggttgcaccaggtaggtgaccaacttttgaaggatcaccagttatggctaatatttcgttaacgccaatgagtgataatccaagtaaatgagactgcaagccgattaagtttcggtctcgacatgtaatatgtacgagtggttcaatattgtaatattgtttaattaagcttgcagcagcaatgttgctaattctgacagttgccaatgaattatctgcgagtgttaccgcatctacattagctttttcaagtttagcgatattttcaaaaaatctatccgtgtctaaatgtttcggtgtatccaattcgataataacggttggacgttcttgaaccttagatgttaatgattgtctaactttattttgagatggattgaaaagtgctttcgttggtatcggaatcacttttttgtcattaacaggtttaagtgtctgaatagattctttaataaatttgatgtgctcaggcgttgtaccacagcaaccaccaattaaacgaacaccttcgcgaattagattttgagcaacttgaccgaaatattgtgcattgtcactatacttaaattcactattttcaatatctaataagctggcatttggataacaagataagtatgcgtgctctggtaattcaatatgtgtgaaagactcttgcatatggtgtgggccatgatgacaattgagtcccacgatgtttgcaccacattgaacgagttgttttaatccttcattgattgcctgaccattaactaagtaatttgtgtttgaagcggttaattgagcaatgattggaatgtcgtatttctttctcgttcgtgaaatgacatttgttagctcttctaggtcgtaatacgtttcgaaaagtagcgcgtcaacaccttcttcaatcaaggtgtctatttgaatttcagtatgataaagaatagtttgtaagctgatatcctcttgtttgatacctctaaacccaccaactgtgcctaatatatacgtatctttatttgctgctttttttgcgatgcgaacggctgcttgatgtatagccttaactttatcttcaagaccgaatcgttttaacttttcaaaatttgcaccataagtattggtttgaatgacatcagcaccggcttcaatatatgaacgatggatacgttcaactttatctggatggctaaggttatatgcttctgggcaggtgtctaaaccttcagagtataaaatagttccaatagcgccatcagctactaaaacattatctttcaagtgtgtgaggaattgactcattgaatgcctcctttaatgcgtatttgatgtctgcaatgagttcatcaggatcttcgagaccaacacttaatcggaacagaccgaaagtgataccacgttcttgtctcacttcttcaggtagtgcagcgtgagacattgttgctggatgtgaaagtatcgtttcaacaccgcccagactcactgaaacgagtggtaatgtcagtgcatcgacaaattgttgtgctttagactcatcagctaaacgaaagccaataacggcaccgccatttttagcttgttctaaatgagtagcagtaagtcccggataataaacttctgaaatttcatcttgctttattaaaaatgacacgattttttgcgcgttttcgacagattgtttaaatctgattggaaatgttttcaaatgtttagcaagcgtccagctatcttgagcagataacatattgcccgtaccattttgtattaaataaagtgcttcactcattgcttcattattagtaatgacagcaccagcaattaaatcgctatgtccacttaaaaattttgtagcactatgaatgacgatatcagcgccaagtaataaaggtgattgacctaacggtgtcataaatgtattgtccacagctaccagtagttcatgcttttcggctattttagaaacagctttgatatcagtaattttaaaacagggattcgatggtgtttcgatataaattaattttgtgtttgattgaatggcaccctcgatttgttcgagcttggtagtatctacggttgtaaattcaatattaaatcgattcaaaatttgctcagtgaggcgaaaagtaccgccatatacatcatcgggtaagatgacatgatcaccagatttgaaagtcaaaagtactgctgaaatagcagcaatacctgatgcaaaagcaaaagcgaatttcccctgttctaatcgtgctaacttctcttctaaaagttcacggttagggttgccacttcgtgcataatcatatttaacatcgccaccaagacttgtttgatggaatgttgaagaatcatagagtggtgggttagctgaatgatattccacacctctacgccaatcgaatatcacttctgtctcttttgaaagtgtcatacaatctctccaatctgagctttatctaatgcttggatgatatcgcgttcgatgtcttcataattttcaacacctagtgataagcggattaaatactcatcaatgccacgtttatctttttcagcatctggcatatcaacatgtgtttgggtgtaagggaaggtcactaatgtttcagtacctcctaaactttctgcaaaaatgcaaatgtctaaattttctaataatttagcgacgctataggccttgttaagtcttaaactaagcatgccagtttgcccgctatatagtacttcgtcaattgcttgaagtgactgacatttttcagcaagttttcttgcgtttgattgcgcacgctcaatgcgtaaatgcaaagttttaagtccacgtaacaacaaataactatctattggtgatagtgttgcgccagtcatgttgtgaaaatcaaacaacttttgcgcgagtgattcatctttgacggttacgacacctgctagtacatcgttatgtccaccaatatatttcgtagctgaatgtaagactatatcagcaccttctgctaatggtgttgaaagataaggtgttaaaaaagtattgtcgataattgacaataagcctttagctttacaaagttgatagtacggctttacatcaatagcaatcatttgtggattggatattggttcaatgaataatgctactgttttatcagtgatttctttttcaacttgttcataatctgtaaaatcaacgtacttaaatttgatatcgtattgttgctcgtaaaattcaaataatctaaatgtgccgccgtataaatcgaatgaaactaaaatttcatcgtgtggtttaaataaattacatattaattgaatggctgacattccacttgatgtagcgaatgatgcaataccatgctcaagtttggcaaaacaggtttcaaatgttgagcgtgtaggatttttagtacgtgtataatcaaatcctgtcgattgtcctagttttggatgcttgtaggcagtagataaatggattggattcgctatagcaccggttgaatcatcagttaatgtgatttgggctaactgtgtatccttcatattaagaccctcctagtaagaaaaaataaaaaagcttccgtccttcgtacccgaatgaatcggataaaaaggacgaaagcttatgtttcgcggtaccacctttatttgttattccatcgctgaaataaccttattcagtacgcattaaaagtaaatatgcttactgaacaattatcacaatttaagtcgttaagtaaggatacagtaatgtgctatcccatacttattaacaaaaaatcgtgcgtaaagaatccagtacgccatttaacatcaatgttaatactgtatcgctataacgggcgaacccgtagacacctcatattggcatcaacactccaaggccattttcaaacacgctttcaaaatcttctctcagctactaaagactctctgtataagcagggtgtgttttactttcctctttattgtgtttacgtttcattaaactgttataagatattaattagcttacagagtaaaaaaagatttgtcaacaattattcagaaaattttgatttaaaagttaatttgtttgtgaaattgtaattggtatcttgaagttgaaaaatgaattattttttaaataaagtgtggttaatggttgtctgactcatttagaatacataaaatatatttaactgttgttatcaaataaaaagtgatgtgagtgaattgtcaaaaagtgaagatcaacgtattactaaaacaaaagatgaacaaattaagcaaatagatatatcggatatcaaaccgaatccgtatcagccccgaaaaactttcgatgaaaatcatttaaatgatttggcagattcaattaagcaatatggtattttgcaaccaattgtgcttagaaaaacagttcaaggttattacattgtagttggtgaaagaaggtttagagcttcgaaaattgctggtctaaaatacgtatcagcgattatcaaagatttaacagatgaagatatgatggaactggcggtcatcgaaaatttacaacgagaagacttaaatgcgattgaagaagctgaaagttatcaacgtttgatgacagatttgaaaattacgcaacaagaagtagcgaagcgattgagtaagtcgcgcccgtatatagcgaatatgttgaggttattacatttaccgaaaaagattgctgacatggtaaaagatgggcgactgacaagtgcacatggacgaacgttattggcaattaaagatgaacaacaaatgcttaggttagcgaaacgggttgttaaagaaaagtggagtgttagatatttagaaaaccatgttaatgaattaaaaaatgtttcgtcaaagtcggaaacagacaaagtagatataactaagcctaaatttataaagcaacaagaacgacagttgcgagaacagtatggcgcaaaagtagatatatcgataaaaaaatcagtcggcaaaatctcatttgagtttgaatcgcaagatgactttgtgagaatcattaaacaattaaatcgtaagtatggtaaatagttacacaattttatataatatcactttgtgaatctatagaaatatcgatagttatctatattctttgaagatgatgcgacttcagtaggttggaagcatacaataatattaataaaattatttgagactatatagaagggagtaacgctaattatggatcaagttatgagtattatttcatcgctattcgaaccattaactaaaattgaaacatatgaaagtgtcgctactaaattagcgatgataattatatatattatcgttgcattaatcgtaattaaaatacttgataaaatgattgcccaaggatttaaaatacaaaacaagagtaaaaagggtaataaaaaacgttcgaaaacattaatatcattggtgcaaaatgttgttaaatatattgtgtggtttatagttgtaactaccattttaagtaaatttggcattagtgttgaaggagtaattgcaagtgctggtgtcgtaggcctagcagtaggttttggtgctcaaactatagttaaagacgtaattacaggattctttattatatttgaaaaccagtttgatgtaggtgattatgttaagataaacaacggtggtacaactgtagcagagggaacagttaaatcaattggactccgttcaacacgcattaatacaatatctggggaacttacaatcttgccaaatagtagtatgggtgaaataacgaattactcaattacaaatggaacagcaattgttaaaattccagtatctgtagatgaaaatattgataatgttgagaagaaattaaacaaattatttacatctctgcgtagtaaatattatttatttgtaagtgatcctgttgtgattggtattgatgcctttgaagatactagagtaatattaagggtttcagcagaaactataccaggtgaaggtttctctggtgcgcgtattattcgtaaagaagtacaaaaaatgtttttacaagaaggtattaagacaccacaaccaataatgacaccttttaatcatagtgaaaacggtgtttagtagtttataatacatggaggtcatatttaatggcgtcaaaatatggaataaatgatatagtagaaatgaaaaaacaacatgcgtgtggaaccaatcgttttaaaattattagaatgggtgctgacattagaattaagtgtgaaaattgtcaacgaagcattatgattccacgtcaaacgtttgataaaaaactaaaaaaaatcatcgtatctcaggatgatacacaaagataggagaatgattcatggctttaacagcaggtatcgttggcttaccaaacgttggtaaatcaacattatttaatgcaattacaaaggcgggtgccttggcagcaaactatccgttcgcaactatagacccaaacgtgggtattgtagaagtgccagatgcaagactacttaaattagaagaaatggttcaacctaaaaaaacattacctactacatttgaatttacagatattgccggaattgttaaaggtgcttctaaaggtgaaggtttaggtaataaattcttatcacatattagagaagtagatgcaatttgtcaggttgttcgtgcttttgacgatgataatgtaacacatgtagctggtcgagttgatccaattgatgacatcgaagttatcaatatggaattagtacttgcagacttagaatcagttgaaaaacgcttacctagaattgaaaaattggcacgtcaaaaagataagactgcggaaatggaagtgcgtattttaacaactattaaagaagctttagaaaatggtaaacccgctcgtagtattgactttaatgaagaagatcaaaaatgggtgaatcaagcgcaattactgacttctaaaaaaatgctttatatcgctaatgttggtgaagatgaaattggtgatgatgataatgataaagtaaaagcgattcgtgaatatgcagcgcaagaagactctgaagtgattgttattagtgcaaaaattgaagaagaaattgctacattagatgatgaagataaagaaatgttcttagaagatttaggtatcgaagaaccaggattagatcgattaattagaacaacttatgaattattaggattatcaacatattttactgctggtgtgcaagaagtacgtgcttggacatttaaacaaggtatgactgcacctcaatgtgctggtatcattcatactgattttgaacgtggatttatccgtgccgaagtaacaagttatgacgactatgtacaatatggtggcgaaagtggcgctaaagaagcgggcagacaacgattagaaggtaaagaatatattatgcaagatggcgatatcgttcatttcagatttaatgtataaacgatagagtgaagttaattaaatagtatatatgtagaagaggcggaatcaattgttcgcctcttttaattatgcgtataatttattaaaagaatggaataattttactcgcgttaataatatcttgagtactgaaaaattgtttgccttcgccagtataagcaggctctaaaacaagattagcctttgcacaataaagccattcaggatgaatgccactattaagtatctcttggaattcttgaaaatctttagaccaatcaatatttaaattcattccttaccacctcacaatcattatagaacatgtgttcgcttttgtgaagtgtatttttaaaaatatcatagaaaatttcaaatgaattaatgtcaaaaatgatatgaagagtagtttgaattattattgtaaaaagtaatggcgcatgatataattctttattgtgagtaatgaaaattattccttgcttatctgttttaagattgataagccgtatagaccacaaggaggtgcaaatataaaatgagaacatatgaagttatgtacatcgtacgcccaaacattgaggaagatgctaaaaaagcgttagttgaacgtttcaacggtatcttagctactgaaggtgcagaagttttagaagcaaaagactggggtaaacgtcgcctagcttatgaaatcaatgatttcaaagatggcttctacaacatcgtacgtgttaaatctgataacaacaaagctactgacgaattccaacgtctagctaaaatcagtgacgatatcattcgttacatggttattcgtgaagacgaagacaagtaataattagagggggcgtttaaatgctaaatagagttgtattagtaggtcgtttaacgaaagatccggaatacagaaccactccctcaggtgtgagtgtagcgacattcactcttgcagtaaatcgtacgttcacgaatgctcaaggggagcgcgaagcagattttattaactgtgttgtttttagaagacaagcagataatgtaaataactatttatctaaaggtagtttagctggtgtagatggtcgcttacaatcccgtaattatgaaaatcaagaaggtcgtcgtgtgtttgttactgaagttgtgtgtgatagcgttcaattccttgaacctaaaaatgcacaacaaaatggtggccaacgtcaacaaaatgaattccaagattacggtcaaggattcggtggtcaacaatcaggacaaaacaattcgtacaataattcatcaaacacgaaacaatctgataatccatttgcaaatgcaaacggaccgattgatataagtgatgatgacttaccattctaataaaaattaacgaaattaaagcgaaaaaattatcaaaggaggcacacaatcatggcaggtggaccaagaagaggcggacgtcgtcgtaaaaaagtatgctatttcacagcaaatggtattacacatatcgactacaaagacactgaattattaaaacgttttatctcagaacgcggtaaaattttaccacgtcgtgtaactggtacttcagctaaatatcaacgtatgttgactacagctatcaaacgttctcgtcatatggcattattaccatatgttaaagaagaacaataatatttagtttattgtaaaaccccgtaagcataggcttatggggttgtttttgtgttttgggataaaagatgaagggcaaaaaagaggatgtgaatgttttgtgttcggaatttgcacaaagatatgtttatattgcaaaaataatatgaatttagatgcataaaaaaagaggcaaccgtcagtaacagttaacctcaagtgcattccgcagatatgcaccgctatttatgtataatattaatctgtttttagataaaaatcaaggttattgataaagttctttaaacttcttaatttaggtcttgctcgaacgcctataattttatcataagtcgactcgcttatctttgatcgtaaaaaatcaaggttttgttcgaattgccttataattctttggagttctgctttagaataagagagaccagaacaaattagaattaataaaatgagataatcaattattctgtcgaaatctaaattgtgtatatccatttttactgctaaatattcttttaatctattacttgtctctccagttttaaatctacagtcataaagtacaccattgtgagctatagcatttcttaagcctttcatacaatcaatgatgtcacctagtatatctttactttgatcaaatgctggggagtataattttagttgtttttgagcttctatatttaaattttgggacatgcaacgagtgaaaaataccagatttcctaaagtgaataattcaaatacggcatatagtggcacggttctatcttgatgtatgtaatgataaatgtaaggttttgaattacaatgttcatggatcatgtcgtaaatatctcttcttagtctagtagtattttttaaatgttttttatattttgaactaccgggactataacttttataatatgttaatgatttttgaaataaactatctaaatcaaagccagagtttacacaaactatttctagcaatctatttttaatagccgtttcacagaacataacgtgtttatagaaaaggtttttaatttctgtatcaaaactgtataaagcgtgtaattcgctgaatttttcaaaattaagttcttcttctttgtttaaaaagaaattataccctttgaatccatgaaaatagccgatgtttcgtaactggtttttttccgtgctaccatttatttggatacctttattgtctcttatatgtctcattaaaccatcagtagttttaggtgtttttctgttcatagtttttaactccccaatcgttcaaatttattcagcatatctttcgccatctgattagtaacatgtgtgtatatctctagatttttttataatctgaatgacctacatgctcttgcattgcttttaagttaattcctaattgagcaagtgtagatatatgcgaatgatgtaatgtatgcgtcgttgcaggtttcttaatagaactaatctcagttgtctctttgatagccccccctttaataatgttatttattttgtttaaatcgataggaccaccagctgcatttgtgaatatgtaccctatattaataaacttatcattcaaagcataagtgttcttagtaagtcgatgctatggatagtgaggcctatagtcctatagctgttacttgttctagttgtctcttttactccggatgcttccatttttaatcagttatccaattaattgtaccatcgatatctagcgttttatcttcatagtttatattttctctttttattgcaagtagctcaccgatacgcatgccattagcaatttgaaactgcactatagattttacctttttataattacgttttctcgttgggtatttttatgctgaattagatagtcgaaacaatccggtatttctttcactacattatcttttaaattgttattacatatagttagtaacgcatcactatagggatatctattttatctattacacatataactttgaattgcttactattttaaattaacaaattttattctcttagaatttgtccaattaagtgtagacgattcaattccataataaagtctctataaaataacttagtttaaaaacgattcgtatctttcagattcaaataccatcattttctcctaagacttacactttaattacaattatgtaagttgttttcagagacatcctattttatattttgtcagaggtgatcttttgaaaacgattttaaaaacaataacatatcttgcatttactatcattggcgcttatgctgctttattcattttaaaaacaatagactctcattgtataacagatcaatttaacccattagtaaaggaagatgattcttatgttaaaacgacagaggtgtctactagaatggatgatcaactccgaagttatagtcaaagtgcttttaataaagaagggaaagagacgcaattaatgtatactgctacatttgatgttaaaccgcatagatacttgaaaattacacataaaggtcatcatgtagaaacttttgaagaagtagaaaaggaagaagtaccaaagaaagcattagacaaactgagtcgataatagcattcttatattacatggttcattttaaagatgagtacgaaatgaagtgacacatgacgattaatttaaaaatatttgtaataattatgaatagaattaaaaacaaggggtaatacaatctatatagcatataagcttttgttatgagtttcaaaaaaaggaagagagagtgatattatgaaattaaaatcattagcagtgttatcaatgtcagcggtggtgcttactgcatgtggcaatgatactccaaaagatgaaacaaaatcaacagagtcaaatactaatcaagacactaatacaacaaaagatgttattgcattaaaagatgttaaaacaagcccagaagatgctgtgaaaaaagctgaagaaacttacaaaggccaaaagttgaaaggaatttcatttgaaaattctaatggtgaatgggcttataaagtgacacaacaaaaatctggtgaagagtcagaagtacttgttgatgataaaaataaaaaagtgattaacaaaaagactgaaaaagaagatacagtgaatgaaaatgataactttaaatatagcgatgctatagattacaaaaaagccattaaagaaggacaaaaggaatttgatggtgatattaaagaatggtcacttgaaaaagatgatggtaaacttgtttacaatatcgatttgaaaaaaggtaataaaaaacaagaagttactgttgatgctaagaacggtaaagtattaaagagtgagcaagatcaataaaatatgccgtaacactaacgatggcaacatgtcttaattcatattaattattaaaataccctcacaacgcaatgtaatatatcccgtatagatttgaaaggatatatgcctaacgtgttgtgagggtttaattgcatctatttatccatgcgaatatcgacttcttctaaatgtttctgatattctttaaccttactttctaaaaacatttcatatggtgcatcaaagaagtcagctaaatgcatggcatctttaaatttaggttcatggtgatgattctcccattcccaaatttgatgtgcttcatatttagtaccatatttctcatttaattgttgtgctaattcgtcaatttctaaattatgtttagttcgtaagttatataaaatatgcatattcattgttcattaacctcgcttcttgatttaaaattcaaagatgctcttataatatgtgtatattctagtcctataacataaaataatcaagctatgaattcggcagaaaaaataatgtatatgatattgccggtacagagactttaaataacgatagctacattgaataaaattgatattcaattactacttttaaaaatatttggataaaaataatttgaatttgttttagaaagtctaataatgggtactacttagaataacgcaaaataaatagaaaaaggagactgaaaattatgtttggatttattggaatgttaattgtcggtggcttaattggatgggctgctggtgctattatgggtaaagatatcccaggtggtattttaggtaatattatcgcaggtattattggatcatgggtaggtggcaaactattcggacaatggggtcctgaattaggaagtatttacatcttgccagctttaatcggttcaattatctttattgcaatcgtaacgttaattttaagagcggttcgtaaaaaataaaatattcaacttaggttgaattaatataaagatggcattcagttgtcatcttttttatttgcgtgaaaatggtcaatatgtattataatatttgaaaatgtaggtaagataggattaaaaagtaataaattaacatgagaagaggttggaaataaaaaaacgagtatttgacaaataaaaaaaggatgacgttgggttgcgccatccaggagtattatgttcatgaatataaaagactgtgtagtcatttaagaactacacccatatagtaacacatcacttgattaaagacaatactatttttagagtcattaatttaaaatatgaattaattctttttttagaatagaatattaagattgatatcgaattagtagtcaaagtgttatggtagatatgaaatacataagataaggagtaatattatgacgatttatttagttagacatggcgaatcaaaatcgaattatgataataaacattttagatcttatttttgtggacaattagatgtgccgttaacggatactggcacaaaaagtgcggacgatttatgtgattattttaaagagaaacagattaaacatgtatatgtttcagacttattaagaacacagcaaacgtttgaacatatttttccatatgacattgcatcaacgactacccctctattaagagaacgttcacttggcgtatttgagggtgaatataaagatgaaatcagtgcgaatccgaaatatgaaaaatatttcaatgatccaaactttaaagactttcgacatagtttttcacaaaaagcgcctgaaggagaaagttatgaagatgtatatcaacgcgtagaacattttatgaatcatgttgtcaatgaagatacacaaaaagatgatatcgtcattgttgcacatcaagttgtcattcgttgtttgatggtttattttaacaaagtttcaagggaagaagctgtggatttaaaggtagaaaattgcaaaccatatatcattgaatagaagtatagaggttctgaaaagctgtgttttatagcggccttcagaaccttttttgtatttggattttaatgggaatcattcttatcaaaagacttcccaccaatagctaatgtgataattgcgcttatgaacaaaataattgaagttataaatgacgctaatgtaaaaggtgtaaattgtgtgagcgataatatcaatgataaaaagaaccaagagatagcccctagaaattgtaaaatagcagaagaaattctaaaactcatattattgaatatagctaaaataagtgcgggtaatgcgactaataccattataatgatgttgagtgtgaataaatatggctgttcgaaagttactgtgtttggacctgttggatgcattgctgctaagaacaagcaaacaatcgtcgataaaattgctaaaataataaaagtgattcgaactttcatcatgaccatcctttgtttatagagtcaatataagtatggaatatgttagggatatagtcaaatgcgtcaactaatggggattttaggatggatagagaatttaaggcaattaaaaaagcatcaaacagtaatatgctgcttgatgcaatatggtattggttaaaatgtattgtctcaaagattagtcacttttaaagataaagaattgtcatgaattaaagcgcatgtactgatgagtgatgtgttacatgtcgcaatgatggctttcagttatttatcgataacatcactcttgatacctttagattttaagaaatctttaattttatcttgttgctttttattaacatcaccggcatattttgttggcacgtcgactacattgattttattttgcggttgatagctaagcttttcaatatcttcgttaacattggcgattgtactatttaaagctttgaagtaattcatcattaattcaacgggtttcttatattctttaggaatattgttttcagtgacaaatttcttgaaatgcaaatcatttttaacagctaagttagataagtggctaagtgtttctgcttgtttttcagtcacttttgtttgactgtcaatttgtttatctagtttatgttgcataatatatttgttatcaagtatatcgctatttacagacaaatacttttctatagcttgcttcatctctgcatcactaatatcactatttttcttatctgagttaaaaatatcttttgtttctaattttttagcgcttttaggtgcatggatgccagtacttgtgtgatgatcttcgttatcagattgatcggacgcgcaacctgtaagaattaatgtcgatgctaaaaatgtacttagtagtaatctctttttcataatgtaatataactccttagtttatctttaattgaaaaaatatgtattcatgtttaatagagtaacattgaattagtttggaatgtcacgatgaccttgcaatgaccatagacgtaaatgattacgtgcatgagttgctttttctatcaataatgcgtcgttttgaacgttgttaaggatagcattatctataaataactgcataattggttgtactaatttagacgtaggtattgtacgtaaaagcataatgatttcattcacatacttttccttctcaatatcatttttcatattgatttgtttgcgtagataactggtaaactctttaattgcttgatcagatttcaaatagtggtgtctatcataatagattaattcctcaacagaagctggtacatagtatccttcatcagaaatatcaatgcctgacgcctcagactcgacaacatcaaataacacagggtgaaacacgaagtcatcttcaatataatatagctcagtaccagctaaagtatctaagctatattgcaactcttctttactaaaagtagcgtcataaaatctttgtgtgagatatagtagatgattagttgataaaataccatacaagtttacagaaccaagtataatacgaagaggtaaaatatcttttttatctattaatcctttcttaatcttagaaatcaattgagtgattgcatcacttcttaagctatcggttgtaccaaaatcttcaaaatcgtcatgttcaagtaacatatctaagtcaacttcgtcttccataaatgataattctaacgcgttttcaaactctgctaaactattctcaattgtttgctcatcaacaaattgatttacagctttctcaaaatcaccattgccgacttgattcacgaaattttcaatatgtttacgcacatcatttggcaaaataagacaatcatattcaaagtcgtaataataataaaaatgactagttaaaaagttgtcaaaatttattaattgtagcttttcaaattcaattagttcattgtttaatcggtagttagcatcactttcaagtatgctagaaagaatgtcaaactcaaatagagtagtattagaaaacacttgttcaatgatgtgattattattgaaaaatgctgtcataattaattcaacaagattttgtttgtttttatttgagaatcctttgataccatactgcctgcatattgtttttagctcgtcattagtttttaacagtaaagcatgttctaatgtgacatcgtttaagcgcgtatgttgtcttacacgtaacacttcttcatttaaattcatatggtttattgtatctaacgattcgaattcaccataggtactatctagtacttctgaattgatataacttaaaaataaattatttacaaagaactcatcttcattaatttgataaacaaaacctagatgatttgttagctttaaaatattaacatcgcgtttatttataattgtgacaggattaccattagatataagtgtttctataaatttttgttctgtcttatccatatcatgataaattttatgtatattttcagggcgtaaagcgtgaatcgtgacttcaaatccttctttttgggtcggtaaattaaaatattcgcatgcattttgtaattttcctgggtatataaaatgaacatcaagcatttttgcacacctcgttgtatatattaagtttatcataacatgattttatgtcgggataaaaaaataacagcatcttaacaaatgtaagatactgtcagtgaaatgaatgaaactttagtttctgataatatagtcaaaggcatttaatgctgcatttgcaccagcgcccattgaaataataatttgtttgttcttctgatctgtgacatcgccagcagcaaatattccaggtacgttagtattattgttacgatcaataacaatttcaccacgttcgtttaattcaacagcatcttttaaccatgatgtgcttggaagtaaaccaatttgaacaaagataccatctaagttaagtagatgttcttcgccggtgctcatgtcttcgtaacgtatacctgtaacatggttttctccgacaacttcagtagttttggcatttgttttgatatcaacatttgataaagaacgtaaacgatcttgtaacacgttgtctgcttttaattcgctagcgaattcgaataatgtaacatgattaacgataccagcaaggtcaattgctgcttcaaccccagagttaccgccaccgataactgctacgtctttattttcaaatagaggtccgtcacagtgagggcagaatgcaacacctttattaatcaattgctcttcacctggaatgtttagcttacgccaacctgcaccagtagcaataatgactgttttactttctaggacagcaccgttttctaacgtaactttaattgcttcgtcagtcttttcgatatctgtagcacgaatgcctgtcattgcatcaatgtcatattgatcaatgtgcgctgctaagttagaagaaaattcagaaccagttgtttctttaacagtaatgaagttctcaataccagcagtatcattaacttggcccccgatacgatcagcaactataccagtacgtaaacctttacgtgctgtgtaaatcgctgcactaccactagcaggaccaccaccaacgattaagacatcataaggttctttgttttcaaactcagatgcatctgccgtactgcctagtttcgaaagaatatcttggattgtcatacgaccattgccaaattcttcgccatttaaaaagacagcagggactgccatgatgttttcagattcttcacggaacactgcaccatcaatcatagaatgcgtgatgttagggttaatcacactcattaagttaagtgcttgaacgacatcaggacatttttgacacgttaaactaatgaatgtttcaaaatggaatgaaccttctaagtttttaatttggtcaatgattgactgtttttctttaggtgcacgaccactaacctgtaaaattgctaaaacaagtgagttaaactcgtgacctaatggaatacctgcaaatgttacacctgtttcttcgccaggacgattgactgagaaacttggtgtacgttttaaagacttttcagaaagtgaaagtctaggtgacatatcagaaatttctgttaataattctttgagttccttagatttatcatctgaaccaaggctggcaacgaattcaacgttgccctccattagttctaatagttgtttaagttgttgttttaaatcagcattaagcatggttgtaatgcctccttagattttacctactaaatctaaaccaggttgcaatgttttagcgccttcttcccatttagctgggcatacttcgccagggtttttgcgaacatattgagctgctttgattttgtgagctaatgtactagcgtcacggccaattccgtcagcgttaatttcagatgcttgtacaacaccgtctgggtcgataatgaatgtaccacgttgagctaaaccagtagcttcatctaatacatcaaaattacgagtgattgtttgtgatgggtcaccaatcatagtgtaagtgattttgctaattgcatctgaatggtcatgccatgctttgtgtacgaagtgagtatcagttgatactgagaatacatttacgcctaatttttgtaattcttcatattggttttgtaagtcttctaattcagttggacaaacgaatgagaagtcagcaggatagaagcatactacgctccaagaaccttttaaatcttcttgtgtaacttctttaaattgatctttttttggatcgaaagcttgcgctgtaaatggtaagatttctttgttaattaatgacataaatatcttcctcctaagaatttaagtatgaattagaactatcaattgattgtgcttaattataataattctaatctcttagttagcattattacattttgatccagaatagtcaactggataactttgtaaagtgaatgattacttttaaaataaagaaagataatataaagtgctttgataatggattttgtagtcgatgatttaaaaggttgtgtctatatttaatatcttgattttaatgtaaaaaatgtaaaaaaagaagatttgtattctcaactaagtcaaccttattgataatggtgtgagaatatttgttcgagatggatgaaggtaatgcgtgagaaactggattttttaagtacgagacaatatttttgaaagttcaattattaacttataagcaaataattgctataaaaaagtttggacgtgtacaattgcaatatgaagatttttaattaactgtaaagtatcgaggagtggtaacgtgtcagatcatgtatataatcttgtgaaaaagcatcattctgttagaaaatttaagaataaacctttaagtgaagacgttgttaagaaattggtagaagctggacaaagcgcttcgacgtcaagtttcctacaagcatactcaattattggtatcgacgatgagcagattaaagaaaatttacgagaagtttctggacaaccttatgttgtagaaaatggctatttattcgtctttgttattgattattatcgtcatcatttagttgatcaacatgctgaaactgatatggaaaatgcatatggttcaacggaaggtttgctagtaggtgcaatcgatgcagcattagttgccgaaaatattgcggtaactgctgaagatatggggtatggcattgtctttttaggatcattgagaaatgatgttgcacgagttcgagaaattttagacttaccggactatgtctttccattatttggtatggcagtaggggaacctgcagaagatgaaaatggcgcagccaaaccacgcttaccatttgaccatgtcttccatcataataagtatcatgctgataaggaaacacagtatgcacaaatggcagattacgatcagacaatcagcaagtactatgatcaacgtacaaacgggaatcgcaaagaaacatggtcgcagcaaattgagatgttcctaggaaacaaagcaagattagatatgttagaacaattgcaaaaatcaggcttaatacagcgatagcaagataccaaaataacccgccccctctagcttaaaatgataagtatagctagaaggggcgggtatttcttgcaatgaattagtgtgaagttaatgcagcattatcatttgattcgaaagtatctttgtcccaatgtttagttaacttggcggtacctgtaccagctagcattgaatcgttcacgtttaatgctgttctacccatgtcaatcaatggttcaacggagatgagcacgccggctaaagcgactggcaagtttaacgttgacaacaccaatatggatgcaaatgtagccccgccaccgacgccagcaacgccgaatgaactaataatcacgacagcgattaacgttacaataaattgtaaatcaatttctacattagcgacgggtgcgaccataattgcaagcatggcaggataaatgccagcacaaccattttgtccaatcgacaatccaaatgtcgcagcgaaattggcaataccctccggcacgcctagacgtcttgtttgtgtttgtacattcagtggtaaggtacccgcgcttgagcgtgatgtgaatgcaaagattaatacttccaaagtctttttaatatagcgaatagggctaatgcctaacaggcttaaaataattaagtgaatgatatacatcgtaattaatgcagcgtacgatgcgattaagaattttcctaaagtccaaatggcgccaaagtcacttgtcgataacgtgttggccataattgctaatacaccgtatggcgttaaacgtaagacgaacgtcacaatcgccattactagtgaatagatagcgtcaatcgcacgcttaagcaattcaccatgatcaggttgtttgcgtgctacgcgtaaataagcaaatcctataaacgaagcaaatatcacaacagcaatcgtggaagttgcacgttgtccagtgaaatctaagaatggatttttaggcaataattccaaaatttgttgtggtaacgtatgtgctgttaaatctttcgcttgtttagcaatttcgcttccacgtgcttgttcagcgttaccaagattaattgttgatgcgtctaaaccaaacatcaaggcatacacaacaccgacaattgcagcaatggtgacagtgccgattaaaaagataaaaatgagactaccaattttagcaaatttttctccgatttgaattttagtgaatgcagcgacaatagaaatgaaaattaaaggcatcacaatcatttgcaacaatgcaacgtaaccttgtccgacaatgttgaaccagtcacttgttgatgttataacattcgaatgtgttccatagacaagatgtagtaacacgccaaatacaatgccgatacctaaagctgtaaacacacgtttcgcaaaagatatatgtttacgagccatcatgtgcaatattacgatgaaaatcaccaatacaataatattaatcagtgtaagaaaagcattcatgaacgtcactcctcaaatttttgaatgtaattccgaccagtatactaagaataatattaattttaaattatttcaagagggcatttgcaattaaatgtaaacatgatgaaattcgaccgttggcataaggggatttgtaaacaaatcgttttgaattcagtagtgataggtggaaagggtaaatagtgtgatgagctagtcgattaaagttaatatttgaaaatgaagcagggcattaaatgcaataaattaaataagttgtcattacagcgttaataatagaaatgattttaacaggaaaaaagtgatgaatatttggaaaagatatatatcgtgtactgtcatgagagataagatatgagaaaacaaatgtatccttgaatcgagatgtggctatggcggtttgataaaaattgctaacctcatatttattgaataaaaaagataataaatgatcaaccttgaaaagacgcttcgaacaaacacgttgtaaaaaattctttcgaatcaaaattagcatcttttgaggattcgtgtgtgcaggtggtagttcaaaagctaccgtaaacaaatatttttgtttgagcaaaaaggcgtttgtagtaaatgtgaatatgagtgtgcccttgtgcgattcgtcatttactaacacagccaaacatttaaattgaatgggcttattaagatgaatctatttagaagtacacagaagccatcccatttaaaagtaacatactacaaaaatttattcaaaattcaatattaatcataatgaataattaaaaaacctgaaacaaattagtttgatatgctctcttcaaagtagatattgaaaggagtttatcagattgtttcaggttttatgaattgagtattaaatttgaaaataaattacagttctatagttttataaaagatcagtttttaaatcatagatatatattactgagtcttacaggctgggacataaatcaatgttctatgctctacgaagttatattggcagtagttgactgaacgaaaatgcgcttgtaacaagcttttttcaattctagtcaaccttgccggggtgggacgacgaaataaattttgcgaaaatatcatttctgtcccactccctacaggttgaataaacgtgcgaagaaaccttttttctcttcttgaggttttggttctgacatttcagactgtgaagctgtgctgtcattttctgctttcgcttccaatgaatcgttcgaagtagcttgtttagaagcttctgcatgggcttctgctacttgttgttcagcatcatgttgcgcttctgcatctactgtagcttctttatttgaagtctcagctgctttgtcatttttagactgctcaacgctggctttttcaattgcttcagttgcagaaatttgatcctctttatctactttagtagcagtgccatcgcctgcattttctgctttagtatccgtcttagcgtctgttgatgtattcactccagcaaccttcgaatctttactttcagccttttcatcagtagcagtattattttcaactttatttgatgattcagccaatactttagcttgagatgcttgtgcttcttggatagcctcttgtgatgtttggatggcttttaaggattcgctatttgaatcgattttagttgtaagttgattttgaagttcttttaattcttgttgttgctgatgtacttgattcatcatttgaccaagtaggtgacgttcttcgcgcattttctggatttctagacgcaaatcttctactagttgagcaacattttgattagtaggtaagtttttgtcatcgtttttgacaatgacttgcaggaagtctttttctttttctaattcatcaaacgctagatcataactatttgtttgttttactttgtcggctatgtctttgaaaagctcgatatcttcttctttgaaatcagttgcttcacgaccacgatattcagtcttgcttagttggtaaccacgttcttctaaatgttgaacaattttacggacttgcttctcacttagttctacgcgttgtgcaaattctttagttaacatactttaaagtcctttctgcatatactttatgtatactgacgtttgtctacgggcagtgaaacgtcagtcttgcttcatacatagtttaaacgttattgttagtgatttcaagtttgtttaaaatggtttacgtaaatccatttcttctaataaatcataaataatttcacgtgcgataccatttgcaaatacatacttcaaaatataatttgatttaacacttgtaccgtagatatcctttgtcagtttaatatttttctttaaaaataagtccacttttttagtgtgaccatcattagttggatgaatgtaatcaatttcagtttgtctttcaaattgatgttcgtataaaaactgtctacggtgttcaataatgagcccattatcttgtgttaaatctgcaggttctttagggacttccatcattaaaaagttaatacttctagaatgaacaaggtttgataataagtttaattcatgttcaatttgatgtaatgtttgtgtcattaactcatcatggttgggtaggtcttttgcaaataaataaattaaaaatgcagaattggttgtggcttcataatgtgcagttgctagactgacaacaacatcgttttctaagcctacgataaagacataatcgttttcagttttgttgttttctaatgagcgtttgatgatacgtttatcttcagttaaagataaatttaacttagtatcgtaaagtttaagtgcttcgttgtaatgtggatctttgacagattgaatggttttaaattccataagaacacctccccaatttaaataatattatagcataatcgcctgttgtaaaagactgttcataaacttttaaatggtataaaaaactgtactatcttaaattagacagtacagtaatctcattttgaattcagtgtgataactaagctttgggacctttagatgcttcagcaaaatgtgtaatatcaacttcttcataagctgaattattttctagtacttcttggtgagatgaatgatcgcgaacgccaacaactaacattttatcgtctaaaataagttgtttatatttttctaattcatcaggcgctaagttgtagcgtgataaaactgcatgttcaccatcttctcctgttaacagtttagtcattttatcactaaatgttccacttgttgagataagggagatttcagagtcgtgtaagtcatttaggtgtaatttacttttactaataattgttagctctgattctaaataaccttcagatttcttttgattgattacgttgtataattcgccagtgtcatttactacagtaatatctgccatagttgtcgcccctttaaaaatttgtttattcaatcttttacccttcttattataaagtaaaacccttacattattaagttataagtcttcattcgcattaaacgtctctgtacatttataaaactattaaaagtttacctaagcagttattgaaaaaatgccgaaaatttgctattatcgttaaataatttacataaactcatataatctaaagaatatggctttagaagtttctaccatgttgccttgaacgacatgactatgagtaacaacacaatactaggagtagcttcagccattaaattgtaaccatgatgggtgatttatatcattttatatgatggtcacagtttatttgatgaaacttcttttacattgattgcatgaccaatacgtgatgcatgttcgttcactcataaaccctgaaactattatttagtttggggatttttttgtatctagcaccaatttaagagcaaaatgtttcacacaaatctgaggaggttttaagagtggagttactaggacaaaaagtaaaggaagacggcgttgtcattgatgagaggattttaaaagtcgatggatttttaaatcatcaaattgatgcaaagttaatggatgaagttggtcgcactttttacgagcaatttaaagataaagggattactaaaatcttaaccattgaagcttccggtatcgcaccagcaatcatggctgcactgcattttgatgtgccatgtttatttgcgaaaaaagcaaaacctagcactttgacggatggttattatgaaacatctattcattcatttactaaaaataaaacaagtacggtcattgtttcaaaagaatttttatcagaagaagatactgtactcatcatcgatgactttttagcaaatggtgatgcttcattaggattatacgatatcgcacagcaagcgaatgctaagacagctggtattggtatagttgttgaaaagagtttccaaaatgggcatcaacgtttagaagaagcaggcttaacagtttcttctctctgcaaggttgcttcactagaaggaaataaagtgacattggtgggagaagaataatgaaaaatttaatcctaagtgttcaacatcttttagctatgtacgcaggtgccatcttagttccaatcattgttggtacaagtttgaagtttacgcctgaacaaatcgcttacttagttacagtagatatatttatgtgtggagttgccacatttttacaagccaataaagtaacaggaacaggattaccaatcgttcttggatgtacattcacggctgttgcgcccatgattttaattggtcaaacgaaaggaatagatgtactttacggttcgctatttttatcagggatattagttattatcatcgcgcctttcttttcacatcttgtgaaattcttcccaccagtagtaacgggtagtgttgttactatcattggtatcaatttaatgccagtagcaatgaattacttagctggaggtcaaggtgcaaaggactatggagatgttaagaacattttgttaggtttaatgacattaatcattattcttgttttacaaagattcacaactggatttattaagagtattgccatattaattggactcgttttaggaacgataggtgctggcttacttgggatggtcgatattaatcaagtcaatcatgccggttggttaggcatcccagtgccgtttagattctcaggatttagctttgatgtgacatcgacgttagtgttctttattgtagctatcgttagtttaattgagtcgacaggtgtctatcatgcgttaagtgaaattaccggtaagaagttagaaagaaaagattttcgtaaaggttatactgcggaaggtctagcgatagtgttaggttctatattcaattcatttccgtatacagcctattcgcaaaatgtaggacttgtttctttatccggcgctaagaaaaacaatgttatatacggcatggtcgtgttattacttatatgtggttgtatacctaagcttggcgcattagcaaatatcataccgctacctgtgttaggtggtgcgatgatagctatgtttggcatggtaatggcatatggtgttagtatattaggacatatcgattttaaaaatcaaaacaatttattaattatcgctgtatcagtaggattaggtactggtataagcgctgtaccacaagcatttaaaggtttaggtgaacaatttgcatggttgactcaaaacggaattgttttaggcgcaatctctgcaattattcttaatttcttttttaatggaataaagtataaacaaacggaagaaaatgtgaaataatataactaattaatttgaaaaatggaggctgtttttaatgtgggaaagtaaatttgcaaaagaatcattaacgtttgatgatgtgttattaattccagcacaatctgatattttaccgaaagacgttgatttaagcgtacaattatcagacaaagttaaattaaatattccagttatttctgctggtatggatactgtaactgaatctaaaatggcgattgctatggctcgtcaaggtggtttaggtgttattcataaaaatatgggcgttgaagaacaagcggacgaagttcaaaaagtaaaacgctcagaaaatggtgtcatttcaaacccatttttcttaacaccagaagaaagtgtttatgaagcggaagcattaatgggtaaataccgtatttcaggtgtaccaattgttgataataaagaagatcgcaacttagtaggtattttaacaaaccgcgacttacgttttattgaagacttctcaattaaaattgtagatgtaatgacgcaagaaaatttaattacagctccagtgaatacaacacttgaagaagcagaaaaaattctccaaaaacataagattgaaaagttaccattagttaaagacgggcgtctagaaggtcttattactattaaagatattgaaaaagttatcgaattccctaatgcagcaaaagatgaacatggtcgtctacttgtagccgcagcaatcggtatttcaaaagacactgatattcgtgctcaaaaattagtcgaagcaggtgtggatgtcttagttatcgatacagcacatggtcactctaaaggcgttatcgatcaagtgaaacatattaagaagacttacccagaaatcacattagtagcaggtaacgtagcaactgcagaagcaacaaaggatttatttgaagcgggtgcagatattgttaaagttggtattggcccaggttcaatttgtacgacacgtgttgtagcaggtgttggtgtaccacaaattacagcaatttatgattgtgcaactgaagcacgcaaacatggtaaagctatcattgctgatggtggtattaaattctcaggagatatcattaaagcattagctgctggtggacatgcggttatgttaggtagcttattagcaggtactgaagaaagcccaggcgcaacagaaattttccaaggtagacaatataaagtataccgcggtatgggctctttaggtgcgatggaaaaaggttcaaacgaccgttacttccaagaggacaaagcgcctaagaaatttgtacctgaaggtatcgaaggacgtacagcatataaaggtgcgttacaagatacaatttaccaattaatgggcggtgtgcgtgctggtatgggttatactggttcacacgatttaagagaattacgcgaagaagcacaattcacacgtatgggccctgctggtttagcagaaagtcacccacataatattcaaattacgaaagaatcaccgaactactcattctaattaagataaaggagaacgacaaatatggaaatggcaaaagaacaagagttaatccttgtcttagactttggtagccaatacaaccaattaattacacgccgaattcgtgaaatgggcgtttatagtgaattacacgatcatgaaatttcaattgaagaaattaagaaaatgaatccaaaaggtatcatcttatcaggtggtccaaattcagtttatgaagaaggttcatttacaattgatccggaaatatataatttaggaattccagtacttggtatttgttacggcatgcaattaactactaaattattaggtggtaaagttgaacgtgccaatgaacgtgaatacggtaaagcaatcattaatgcgaagtcagatgagttattcgctggcttaccagcagaacaaactgtttggatgagtcattctgataaagttattgaaattccagaaggctttgaagttatcgctgatagtccaagtacagactatgcagcaatcgaagataagaaacgtcgcatttatggtgttcaattccatccagaagtacgtcatacagaatatggtaatgatttattaaataattttgtccgtcgtgtttgtgattgtaaaggtcaatggacaatggaaaactttatcgaaatcgaaattgaaaagattcgtcaacgcgtaggagaccgtcgtgtattatgtgcgatgagtggcggcgtagattcatctgttgtagctgtactattgcataaagcaataggtgatcaactaacatgtatctttgtagaccatggcttacttcgtaaaggtgaaggcgatatggttatggagcaattcggtgaaggtttcaacatgaatattatccgtgttaatgcgaaagatcgctttatgaataaattaaaaggtgtttcagatcctgaacaaaaacgtaaaatcattggtaatgaatttgtatatgtgtttgatgatgaagcatcaaaacttaaaggtgtagacttccttgcgcaaggaacactatatacagacgtcatcgaatcaggtactaagacagcacaaacaatcaaatcacatcacaatgttggtggattaccagaagacatggaattcgaattaatcgaaccaatcaatacattgtttaaagatgaagtacgtaaattaggtattgagttaggtattccagaacatttagtatggcgacaaccattcccaggacctggtcttggtattcgtgtacttggagaaattactgaagataaactagaaatcgtaagagaatcagacgcgattttacgccaagtgattagagaagaaggtcttgaaagagaaatttggcaatacttcacagtgttaccaaacattcaatcagtaggtgttatgggagactaccgtacgtatgatcacacagtaggtatccgtgcagtaacatctatcgacggcatgacaagtgacttcgcacgcatcgattgggaagtcttacaaaagatttctagtcgtatcgtaaacgaagtagatcacgtcaaccgcgtagtctatgacattacatcaaaaccaccaagcacaattgagtgggaataattatatatagcaggctgggacataaatcaatgttctatgctctacgaagttatattggcagtagttgactgaacgaaaatgcacttgtaacaagcttttttcaattctagtcaggggccccaacaaagagaaattggatttccaatttctacagacaatgcaagttggggtgtgggccctaacacagaaaattcattttattgaattttacatttatgtgcaagttgggcaaagtgtcttattttttcaaagtatttaaaagtaaaattacatgttaatacgtagtattaatggtgagactcctgagggagcagtgccagtcgaagaccgaggctgagacggcaccctaggaaagcgaagccattcaatacgaagtattgtataaatagagaacagcagtaagatattttttaattgaaaattatcttactgctgtttttttagggatttatgtcccagcctcttgatgatttaaaattacaataaggacggaaaaggggtaaggtgttctaagtttgcgttttaattcatcaataaggcaattttccgtgtttatttttatataaaatttcatattgtttaggatcttcttgttttaaatcataaattatagtttcgtctactattttttctaattcaagtgtattaaagctccagtcatttgttgttattataaatattttttggactgggttgttatttatatgattaattagcctaggagtatctgtttctattattagagcagattctacaggatagtaaatagcaaagtctccgtgataaattgtgtttctttcatagaggttaacctctaaggttaaattactcaatttgaagattgtgttttgagttatatttttaggaataattcgattatctactatttgttttaggttgcctattgaacgagtgtgtatcgtcccttttgtgtaatcggaattatttaaagctcttaaaacagttgttaatttatactcgttaatataaccctttactaaagccatccgtttatcgctacctataaaatctttcagttttttgttgaattcatttttgttgtgcataatattttatcctttccattagttgattgttttcatttgttcaaatctctatccatttactcggttacagggctgtgtatttgcagagtaatattatgattggaataaccaacgcgttccgtattcgttttgagtgacgcagctagctacgataatagtgacatgtggcttataacacattgtgtaatttattgtgtgttttgtgatgtctatattggttgcagattgttgtatatttcacttaaagggcatttatataaaaaaagaggccagatgacgtatcatctgaccttcagctaaaacgctgagaatatgtcattcttcaagagaatgaagccggaatggttaccgggaatttgtaaaccaattatatcagatgtaatattacaattcaattagaaaagaactttatctttaattgcttttcgatttcattcatgtcatcttctgaaattattatcgttccagtaggatcagaatcatttattttgcttatacgtcttttgcttattgttgtaattgctgatatattaacgtatgtatctttccctttgtgcttggaataaacacctatcactctatacagttcattagctttttgatttaagttagacaaaagctttttatcttctgtgctaagtttaatgtcaatatctctatatttttgggctaatgcttgtactttactactgatatcgataatctgttttttttaaatctgttgttgttagatttagcaccgattcgtttaacttcaaataatttttattacctttggaagaaagtggaactattgtaactgtttcttttcctttattgtctttgttatctaatattacacaaaaatgattaccagaaaactcacttccaatattactccctagttttacatataccactgttcctctactatatgatttataatatctttttttattgcttgtaacatcgctatgtatagcaattgaataaaactctagccaatgaggcatgtatataactttcaagtttttactatcggattttgaataagcttgttttagttttttgtttgacgtatttaatttactatttgcttgattgatatttttagacattaaatagtgttctcctaatcaatttattcttctttatatcagcattattagcactgaaattaacatgaatggtacgaaaatagatgttactataaaaccaacaattttattaggtggaactcatcaattttgtatttaacaaatttcgcaatgacctcctatttatccgctttttatagttcatgtatgtgtaaaaaagcctatattgaacatctaattataaacgaattcctaatgctaaaagcaatctaacttacttaaatattattatgagtttttattgaaattaaataaatttaaactattttttagtctctccatatcgttggaagttggttctttatataatcagataaattagaatcttcaagtaatgtgtctttaaaaagttcagtttctaaatcaactctaatatttgaagttagaaaattttttatttcataaatagtttcacaatcaattttgttgctgccatatatatacactatatttaattaaatcatttagtacatttaaaagaatttgatgaacttatacaaaagtttcaagaaatagaaaaaatatcttctgatataagttttgcgaccgaattaaatgacgcacaaaaattgttatattagaggcacaaaaaatggatgaaattaaattaaaatgcgatatacatgtttcagtggtgttgctgtgtatggtgatattaaagtctgtgaaaataatcatggcgaattaatcaaaaagcactgcaattataaaaatattatatatatgtaattgtattttattatgatgaagtaaatgatttaaagcagatacatgatgcgttcagatcagtttaaagcagtgttgcatagttttcgcacactataatacattcaatcatacaattgaaacgtatagagtgtttttgtagataccgttgaataagaagataaacgtaaaagattatcgtaaatataaaaaactttagtaaataaaattgttcataaagtggatgaaggtttatatcagtcaagtagatttacattacaagttattcaaaagtacatatatttgttaagggagtgaacgattatccaattcagcatgttttttgctcttattattcctttttattgattcataataagtacttctaagactttgcacattaatggatattgaatattgatacgcattctgttaaatgatttctatttcgtctcgtgattagcaatatttgctttaaaacatcattttccatttttaaatgttgaacttctttgcgtaattttattaactctttttcatcactttttaaattatcttgatgattgaaggacccagtattttggtgttgttttatcggatttgagaaagttgaggttgttaaatcatactcgcgtataatttcatttttaggcttaccattttcatataatctaaccttttgtaacttaaactctgaactaaatgatcttctttctcttgtcgtaataaaatagcctactttcttaaattaacaatatctattctcatagaatttgttcaattaagtgtagacgattcactgacacatcataagtacgttaggaattttgatcgttcattgttattgctttatgttttaggaaatgtgctattgaagggtttaaagatgtttggaatttcttggtttcttgacttatatagttatgaaagagggcgttgtcctttattaaatttctgagatcagaaatgctataaataaagtgattaagattttttgttttcatgtaatttaagaaatggatttgttttttgtgggttatttttaattctgttctgaaatggtttgaattttgcagttgcaaatatggtagctgcatcttttgacaaagtaatagaacctttttcttctggtaccatgatattcactccttgtacaatttgatttaaagtttataaaataattttactatgtataataatttgtgtaaatagtttcttattgttaccgaataatttgtttggaagcgttatgtaatgccaatcaacaccaaagtcctcatgtcctcattccttttgcgactacatatattgttaataatattgaaattataaactgatagtgataatttagttaactgacccatgagagtaggaaccccaccatacgggaatttcgaaatcatgggttttttgttttaaaggattgatgcaatagataaagtagccattctaatatatggagtatttatcaactaaaaattaaaacagatatgaattttcttcattaaataatttttctataaggaaacagaggcaacgctactgtcacctctgcttgaaataattaggttgaaatactctgagtctaaagtccatacccaaatcgctcaaatcctccaaacctccgactacatctccaaaccccaaaacaccaatacttaccaaagcattgatataagtgccaatactggcaatgtgccttgtttgaaaaagatactaatattgcttgaaaggccaccataaatagcaacgccaatgatatacactaaaatagctgcgcatatttcttttggattactgctgataaataaaccgtatattagcaaaactccgattaaaccattatatacgccttgattcttcaaaagtacgttaatatttttgtctttcaatttatcgacgcttatattaaatgtctcgctggtctttctggaagttgtagcaatcgtttcaaggtacataatatagaaaaattctaatgccacaaatatgattaaaattgtcgagatgatattcactgtaacgctcctttagtattaaatattttcttgtaaaaatgattgcagtgtctgtggttgatcattgactaattgttggaattcattggattcttggtctaatagtcctcttgctcctgcgtcgtacattgatgccaataatgcaccaaagcctttaggttcatcgtacatttctgcaaatgtctctaatgaaacgggttcatatttaatttctgtgcctgatgcctcagataaaattgcagcaagttccttcatatcataactgtagcctgataataaataacgtttgccccaagtatctggatttttaataatagcaatgacacctctagcaatatcatttctagtaatataattaatacgaccatcaccagctggataaatcagtttatgcatattcatcaattctggtaaatatggtttaagtggatccatgtacatcgccattcttacatacgtataatcaatgccacttgttgccaataaacgtgatgcatatccgaaataagggctcatatggaatggattattatgctgatctgcgtaataacctatgaaaatgatatgagcaacgccactttgctttgcggcatatactaaattttccacttcaggaatacgtttaaatgatggatggataatacttggaataaacacaacggtgtcgatgcctttaaatgcttttaccatgctttcttgattaaaataatctaattgtcgaacagaaacttttccgcgccaatcttctggaactttctcaacatttctaacaccaatgtgaaaatgatctatgtgatttgcaatggcttgatttgtaatatgtgtgcctaaatgacctgtagcacctgttaacataatattcattcacttcatctcctaatctttatatacataacataatacttattcgatgattttcaaaacatttgattttataaaaaattgcaatctgtatttattgtcgccgtgtatagtaaatacgcatatgttattaatgttaaaaataccgtaatgacgcgttttagttgatgcgtgtcaccatgatctttgaaaattttgacatggtactgcgacgatatgatgtcatttttgtgtctgaaagttttacagtttttaaaattaaaatggtttaaagtgtgaattgtataaaaaagagtcttgacggataagaattgattattaacagttagcattttattaattaccttaacaatgattcaagtttagttaaatgaggtttaatttgaaagggaatagcgcctcaatataatgtaggtagattgttcatattacgtaattgaaaaatcaaatttaaatagattggggctaaaaattatgaaatttaaagcgatagcaaaagcaagtttagcattgggaatgttagcaacaggtgtaataacgtcgaatatacaatcagtacaagcgaaaacagaagttaaacaacaaagtgaggctgatttaaaactttattataatggaccaagttttgaatataaaaaagtaactggatatggatttattgaaggtaaagatagattcattgattttatatacaatggacaatataataaaatatctttagttggttctgataaagataaatataatgaagaagttaacccagatatagatgtgtttgtcgttagagaaggaaacggtagacaagctgataatcattcgattggtggcgtaacaaaaactaatagaggagtgtattacgactatatacactctccaatccttgaaattaagaaaggtaatgaagaaccacaaaatagtctgtatcaaatttataaagaaaatatctcattaaaagaacttgattatagattacgagaacgtgcaatcaaacaacacggcttgtattcaaatggtcttaaacaaggtcaaattacaattactatgaaagatggcaaatcacatactatcgatttaagtcaaaaacttgaaaaagaacgtatgggtgattctatcgacggcagacaaatacaaaaaattctagtagaaatgaaataatactttctaacgacaaagcgctatgttgaatcgtgcttgttatggaaatatatggaagttaagcgacgtactgttgcttagcttcttttttgagggcaaagttacaaaactcacacaaacagtcgcagcacgcattatcttttacttaactagcttaatcatattttatgaatagttaaaaaagggttaatgtgaatatcagcatacagctcctataatatggttgtatgattcaatttacgtaataaaacaatctaatctaatatattggagcatacaattatgaaaatgaaatcaattgcaaaagtaagtttagtgttgggtattttagctacaggtgtaaatactgtaacggaacaaccggtgcatgccgaaaataaacatgttcaagtaagccaaaatagtaaaaatttaaaagcgtactatactcaacctagtgttgaatataaaaatgtgacaggttatatcagtagtattcaacctaaaccaggcactaaatttttgaatatgatagaaggtaatacagttaataatctagctttagttggcaaagataaggaacactatcatacgggtgtacatcgcaaccttgatatattttatgttaatgaggataagagatttgaaggtgcaaagtactcgattggtggtatcacaaaagcaagcgataaagttgtcgaccaagtagcagaagcaagagtcattaaagaagatcacactggtgaatatgattatgactttttcccatttaaaatagataaagaagcaatgacattaaaagaggttgattttaaaataagaaaacatcttattgatcattatggtctttatggtgaaatgagttcaggaacagttactgtccaaatgaaatactatggcaagtatacaattgaattggataaaaagttacaagaagaccgaatggccgatatcgtcaaagtcatagatattgataggattgaagtcaaagttaaaaaagcataatgcttagactggtcgtcgtaatgaattgaaattgcaatagtgaggttaagtgatgataaaacgttacttaacttcttttttatgtcttaaaatcatttcaaagatacatagtaacaccacataaacctcgaaagtactcattattttttgcttaaatgacttaataatatttcaacaattgttaaacgagggttaatgtgaatagaccaatatgtcctctataatgaagttgtatgattctaattacgtaaagaacaatcgaataattacgattggagcatacaactatgaaaataagaacaattgcgaaagcgagtatagcgttagggcttgtaacaacaggtgcaagtatagtaacaacgcaatcggccaatgcagaagtagcatcagcacttaaagcaggacagttagcaaagataaacgtatcaacaagcgcaatcacaacgacagcgcaagcagtgaacgcagaacaaaatcatacggctaatcctgaacaggcggcaaagtctaacacagaaaatgtatcaacatcgctttcaactcaaacagaacagacgccaaaatctaacatacaaaaagcaacacaaccagcaccaagcggaacaactcagtctttaccaaatgcacaaccgcaatcaacacaaccaacaccaagtgtaacaacaccgccttcatctaatgtcgaaacaccacaaccaacatcgccaaccacaaaacaagcacaaaaggaaataaaccctaaatttaaaggtttaagatcatattatacgaaatcaagtttagaatttaaaaatgagttgggtataattatcaaaaaatggacaacaataagatttatgaatattgttccagattatttcatatataaaatagctttagttggaaaagatgataagaaatatggtgaaggcgtgcataggcatgtcgatgtatttatcgttttagaacaaaataaatatggcgtagacaaatactcggtcggtggtatcacaaaagcaaatagaaagaaagttgattacaaaactggaataagtattactaaagaagataaaaaaggtacaatctcacatgatgtttcagaatacaagattactaaagaagagatttccttgaaagaacttgattttaaattgagaaaacaactcattgaacaacataatttgtacggtaatattggttcaggaacaatcgttattaaaatgaaaaatggtggaaagtacacgtttgaattacacaaaaaattgcaacaacatcgcatggcagatgttattgatggtacaaatattgatagaattgaagtgaatctaaaatcatcgtgatggatactacatagaaccgttgaacgatgaaatgagaagttaagcgacaatgacctacatcattgcttagcttcttttgttttgcgtaatgatgttaagggaaattattcacttgtttgtaaaagtgacatctcaatgtcttgaaaatgatgcaatgcccaatgtgcaagcgttgaatcgcttcgaaaccatctgtatttaacgaaaattatggattacttaacgatgattcaaatatagttaaacatggtttaatgtgaatagaccgatacgtcttctataatgtagttgtatgattctaattacgtaaagaacaatcgaatataatagattggagcatacaactatgaaaatgacacaaattgcgaaaaccagtttagcactatcacttttaacaacaggtgcaagtatagtaacaacgcaatcggctaatgcagaagtagcatcagcacttaaaacagaacaggcaataaaatctaaaatacaaaaagtaacaacatcgccttcaacaaaagtaaaagcaacacaaccaacaccaagtgtaacaactccgccttcaccaaatgtacaaccgcaatcgccacaaccaacaccaaacccaacaacaccgcattcatctaatgtcgaaacaaaacaaccgcaatcgccaaccacaaaacaagcacaaaaggaaataaaccctaaatataaggatttaagaacatattatacgaaaccgagtttagaattcgaaaagcaatttggctttatgctgaaaccatggacgacagttaggtttatgaatgttataccagattggttcatttataaaatagctttagttggaaaagatgataagaaatataaagatgggccatacgataatattgatgtatttatcgttttagaggacaataaatatcaattgaaaaaatattctgtcgggggtatcacgaagacaaatagtaaaaaagttgatcacaaagcagaattaagcattactaaaaaagatgagaaaggcaaaatctcacacgatgattcagaatataagataactaaagaagagatttccttgaaagagcttgattttaaattgagaaagcaactcattgaacaacataatttgtacggtaatattggttcaggaacaattgttattaaaacgaaaaacggtgggaagtacacgtttgaattgcataaaaaattacaagaacatcgcatggcagatgtcatagatggcactagtatcgaaagaattgaagtgaatctaaaatcatcgtgatggatactgcatagaaccgttgaacgatgtaccgagaagttgagtgacaaaaatttacatgttgctcagcttctttcgtgttgcacagtggtataagaagacgaatatttgatgttgaccacacataacatgcttatgtcctaaatgtgtctaaaaataccaatctatcaagcgttgaagtacaacaaaagtcatttttatttaacgaacattatggattccttaatttaattaacgatgattcaaatatagttaaacaaggtttaatatgaatagagacatacgccaactataataaagctgtatgattcaataaacgtaatcgaacaaatctaataattacgattggagcatacaactatgaagatgacagcaattgcgaaagccagtttagctctaagtattttagcgactggggttataacatcaacggctcaaactgtaaatgcgagcgaacatgaatcaaaatatgaaaatgtgacaaaagatatcttcgacttgagagattactatagtcgcgcaagtaaggaacttaaaaatgttactggctatcgttatagcaaaggtggcaagcactaccttatctttgataaaaatagaaagttcacaagaatacaaatttttggtaaagatatagaaaggattaaaaaacgtaaaaatccaggattagatatatttgtagttaaagaagcggaaaatcgcaacggcacagtgtattcatatggtggcgttactaagaaaaatcaaggcgcttactatgattacttaagcgcacctagattcgttattaaaaaagaagtaggtgcaggtgtttctgtgcatgttaaaagatactacatttataaggaagagatttcgctgaaagaacttgattttaaattacgacagtatttaattcaagattttgatctgtataaaaagtttcctaaagctagcaagataaaagtgacaatgaaagatggcggctattatacgtttgaactcaataaaaagttacaaacaaaccgaatgagtgacgtcatagatggcagaaatattgagaaaatagaagccaatattagataattcaacgaaacatggataatagtaaaatatggatagtatagatgagctaggcagcataggttgcttagcttcttttttgtgtcgttacgatcggaaatgaagtgggtcgatgaaagataataacgacaataaaaactgtgaaaatagttgatacctatagtcgcacggtgtcgcactagtgacatgaaacaatgtggaaaacataattaaattgaaagaaagtgtgaatggtgaaaaaaatagcatagagttataaaaaatgattaatactgttaggattccattaattagcttaacattggttcaggaatagttaaaaagcggttaattcatagcgcagtatccggcttatataatgatagtagattgttcgtattacgtaattgaattaatcacataaacatatattaagtcaaaatttaaaaatagattgggagaataatactatgaaattaaaaacgttagctaaagcaacattagcattaggtttattaactactggtgtcattacatcagaaggtcaagcagttcaagcggcagaaaaacaagagagagtacaacatttacatgatattagagatttacatcgatactactcatcagaaagtttcgaatatagtaatgttagtggtaaggttgaaaactacaatggttctaacgttgtacgctttaacccaaaagatcaaaatcaccaattattcttattaggaaaagataaagaacaatataaagaaggtctacaaggccaaaatgtctttgtagtacaagaattaattgatccaaacggcagactatctactgttggtggtgtaacgaagaaaaacaacaaaacttctgaaactaatacacctttatttgttaataaagttaatggtgaagatttagatgcatcaattgactcatttttaatccaaaaagaagaaatctcattaaaagagcttgatttcaaaattagacaacaattagttaataattacggattatataaaggtacatctaaatacggtaaaatcattatcaatttgaaagacgaaaataaagtagaaattgatttaggtgataaattacaattcgagcgcatgggcgatgtgttgaatagtaaagacattagaggtatatcagtcactattaaccaaatttaaagtaagcaatcaatgactttaaagtaataaattttgaggcagcttaacgatgaaacgttgaataaatatgtatatcctatcaaaggagcgtatttaaagcaacgtcgtcgttaggctgttttttacatttgataacacaagtcacgagtatactaaataagtcataccactcattaaaaccacgtactttgaatattaattaggtgttcattaacaatgattcaaagttatttaaacgcacgttaatgtcagtttgtttcgatgcactttataataaaggcagatgtttcaaattacgtaatcataacaatccaatacattaagattggagcaataaattatgaaattaacagcaatagctaaagcaacattagcattaggaatattaacaacaggtgtgatgacagcagaaagtcaaactgtaaacgcgaaagtaaagttggatgaaacacaacgcaaatattatataaatatgctaaaagattactattctcaagaaagctatgaatcaacaaacattagtgttaaaagtgaagattattatgggtctaacgttttaaactttaaccaacgaaataaaaatttcaaagtatttctaattggcgacgatagaaataaatataaagaactgacgcatggccgtgatgtctttgcagtacctgaattaatagatactaaaggcggcatatatagcgttggcggtataacaaagaaaaatgtgagatccgtgtttggctatgtaagtcatccgggactgcaagttaaaaaagttgatcctaaagatggcttttcgataaaagagttgttctttattcaaaaagaagaagtatcattgaaagaacttgattttaaaatcagaaaaatgttagtcgaaaaatatagattgtataaaggcgcgtcagataaaggtagaattgttatcaatatgaaagacgaaaagaaacatgaaattgatttaagtgaaaaattaagttttgatcgtatgtttgatgtgctggatagtaagcagattaaaaatattgaagtgaatttgaattaattaaagatgatagtataaaaaattaaaaagcggcttaacgataaaatgtgcattgacacccgtacctttgaataagaactgtgttaaatacattattgttgttaagttgttttttgcgtttcaaagagtagaaataacacaattagttgtagaaaacgatgatccggaaaaacaacgacatgtaaagcgtgaaagttaattaacctggacattaaaatatatttgtttttaattaataataattcacgcatatttaaatcgaggttaattatcgcgttaaacgatggacgttataataagcgtatatgattcaaattacgtaataataacaatccaatacattaagattggagtaaataaatatgaaattgacagcattagcaaaagtaacattagcattagggattttaacaacaggaactttaacaacagaggcccattcaggtcatgctaaacaaaatcaaaagtcagtaaacaaacatgacaaagaagcattacaccgatactacactggaaactttaaggaaatgaaaaacattaatgctttgagacatggtaaaaataacttacgttttaaatatagagggatgaagactcaagtattattgcctggagatgagtaccgtaaatatcaacagcgaagacatacgggcttagatgtgttttttgttcaagaaagaagagacaagcacgacatatcatatactgttggtggtgtaacaaagaccaataaaacatccggctttgtcagcacaccaagattaaatgttacaaaagaaaagggtgaagatgcttttgtgaaaggttacccttatgatattaaaaaagaagaaatatcattgaaagagttagattttaagttgagaaagcatctaattgaaaaatacggtctttataaaacactctcaaaagatggtaggattaaaattagtctgaaagatggtagcttttataaccttgatttaagaactaaattaaaattcaaacatatgggggaagtcatagatagtaaacaaattaaggatattgaagtgaatttaaagtaaatcattatgaataataaaaagtaattgaagcggcttaacgatgaaaagtaaattggtgcgtataccttaccaaaaggatgcatcaatcgatatcgtcgttaagccgtttttgtttgcgtgttatgaatcctatcccaatctccatgaatataaaatttccaccatcaacatcaaaattctcaacatcgcgacaccaccaaatgttataataaatctattacacaaagagacaaattacttatgcaaaggcggaggaatcacatgtctattactgaaaaacaacgtcagcaacaagctgaattacataaaaaattatggtcgattgcgaatgatttaagagggaatatggatgcgagtgaattccgtaattacattttaggcttgattttctatcgcttcttatctgaaaaagcggaacaagaatatgcagatgccttggcaggtgaagatattacatatcaagaagcatgggcagatgaagaataccgtgaagacttaaaagcagaattaattgatcaagttggttacttcattgagccacaagatttattcagtgcgatgattcgtgaaattgaaacgcaagatttcgatatcgaacatctggcgacggcaattcgtaaagttgaaacttcaacactaggtgaagaaagtgaaaatgactttatcggactgttcagcgatatggacttaagttcaacgcgtttaggtaacaatgtcaaagaacgtactgcgttaatttccaaagttatggttaaccttgatgacttaccattcgttcacagtgatatggaaattgatatgttaggtgatgcatacgaatttcttatcgggcgctttgcggcgacagcgggtaaaaaagcaggcgagttctatacaccacaacaagtatctaagatactggcgaagattgtcacagacggtaaagataaattacgtcatgtatatgacccaacatgtggttcaggttcattactgttacgcgttggtaaagaggcaaaagtgtatcgttattttggacaagaacgtaacaataccacatacaacttagcgcgcatgaacatgttgttacatgatgtgcgatatgaaaatttcgatatccgtaatgatgatacgttggaaaatccagcctttttaggacatacatttgatgcggttattgcgaacccaccatatagcgcgaaatggacagcagactcaaaatttgaaaatgacgaacgcttcagcggatacggcaagcttgcgccaaagtctaaagcagactttgcctttattcaacacatggtacattacctagatgatgaaggtaccatggccgttgtactcccacatggtgtcttattccgtggtgccgcagaaggtatcattcgtcgttatttaattgaagaaaagaactacttagaagccgtgattggtttgccagcgaacattttctatgggacaagtattccaacatgtatcttagtatttaaaaaatgtcgccaacaagacgacaacgtattatttatcgatgcatccaatgattttgaaaaaggaaaaaaccaaaaccatttaagcgatgcccaagtcgaacgaattatagacacatataagcgtaaggaaacaattgataagtatagctacagcgcgacattacaagagatcgccgataacgattacaacttaaacataccgagatatgtcgatacattcgaagaagaagcgccaattgatttagatcaagtccaacaagatttgaaaaatatcgacaaagaaatcgcagaaattgaacaagaaatcaatgcatacctgaaagaacttggggtgttgaaagatgagtaatacacaaacgaaaaatgtgccagagttgagattcccagggtttgaaggcgaatgggaagagaagaaggttggcgagttattagaatttaaaaatggtttaaataaaggaaaagaatattttggctcaggatcgtcgattgttaacttcaaagatgtatttaataacaggagcttaaatacaaataatctgactggaaaagttaatgtgaatagcaaagaactaaaaaattattctgttgaaaagggtgatgttttttttacaaggactagtgaggtaattggtgaaataggttatccgtctgtaattttaaatgaccctgaaaatactgtgtttagtggatttgtattaagagggcggcctaaatcaggaattgatttaataaataataattttaaaagatatgtcttttttactaattcatttagaaaagaaatgattacaaaaagttctatgacaactagagctttaacatcaggtagcgcaattaataaaatgaaggtcatataccctgtttcggctaaagaacagagaaaaataggtgacttcttcaacaaactcgaccgacaaattgaattagaagaacaaaagcttgaattacttcaacaacaaaaaaaaggctatatgcagaaaatcttctcacaggaactgcgattcaaagatgagaatagtgaagattatccacattgggaaaatagcaaaatagaaaaatatttaaaagagagaaacgaacgttctgacaaaggtcaaatgctttcagtaactataaatagtggcattataaaatttagtgaattggatagaaaagataattcaagtaaagataaaagtaattataaagtagttaggaaaaatgatattgcatataattctatgagaatgtggcaaggggctagtggtagatcaaattataatgggattgttagccctgcatatactgtgctttatccaacacaaaatactagctcattatttattggatataagtttaaaacacatagaatgattcataaatttaaaattaattcacaaggattaacatcagatacatggaacttaaaatataaacaattaaaaaatataaatatagatatacctgtattggaggaacaagaaaagataggtgatttctttaaaaaaatggatatattgattagtaaacagaaaataaaaattgaaatattagaaaaagagaaacaatcctttttacaaaagatgttcttataactttgataaacacataggttgcataagaataaaatttgtgtaatttaacataaaagttataaacataaagtaaattaaaaacgaacattaaatttaggcactgtgatagcacagtgtcttttttgtgtcgaaattgtgtacagaataagtagttaaataaagattaagttgagataaagtgttattcgtaaataaaagagagtagatcgataggaattgaatgatattagttaactatttattaaatcacttaataatgattaatttttagttaaagtaagtttaatgtgaagcacgaccgttgctcattataatgaatgaggattgttcgtattgcgtaatagaataaatcaaatagactaaaaattgggagcatagaattatgaaattaaaaaatattgctaaagcaagtttagcactagggattttgacaacagggatgattacaactactgctcagccagtaaaagcaagtgagcaaagcagattatcagttacttcaaacgacacgcaagaattaaaaaaatactacagtggaacaggatataattttcaaaatgtgagtggttatagagaaaaggataaaatgaacattattgatgggacacaacttaatgtagttactttacttggtacagacaaagaaagatttaaagattatgactatgattatgaagggttagatgtctttgtagtcagagaaggatcaggtaaacaagctgaaaatatttcaataggtggaattaccaagacgaataaaaacgattataaagatttcgtaaataatgtaggtctagaaataactaaaccaacaggacataatacagcaacaagacaagcagaaacttatagaattaataaagaagaaatttcattaaaagaattagatttcaaattaagaaaacatttaattgaaaatcatgaactttataagacagagcctaaagacggtaaaattagaattactatgaaaggtggcggctactatacttttgaattaaataaaaaattacagcctcatcgtatgggtgatgtaattgatggtagaaatatagaaaaaattgaagtcgatttatattaatattcgagggagtatatcatgagggaaaattttaagttacgtaaaatgaaagtcgggttagtatctgttgcaattacaatgttatatattatgacaaacggacaagcagaagcatcagaggctaatgagaagccaagtacaaatcaagaatcaaaagttgtttcacagactgaacaaaattcaaaagaaacaaaaacagtagaatctaataagaactttgttaaattagatactattaaacctggagctcaaaagataacgggaactactttaccaaatcactatgttttattaacagttgatgggaaaagtgcggattcagtagaaaatggcggtttgggttttgttgaagcaaatgacaaaggagaatttgagtaccctttaaataatcgtaaaattgttcataatcaagaaattgaggtttcgtcgtcaagccctgatttaggtgaagatgaagaagatgaagaggtggaagaagcttcaactgataaagctggcgttgaggaagaaagtacagaagctaaagttacttacacaacaccgcgatatgaaaaagcgtatgaaataccgaaagaacaactaaaagaaaaagatggacatcaccaagtttttatcgaacctattactgaaggatcaggtattattaaagggcatacgtctgtaaaaggtaaagttgctttatctattaataataaatttattaattttgaagagagcgttaagggcggagttagtaaagaagacactaaagctagttcagatggtatctggatgcctattgatgacaaaggatactttaactttgacttcaaaacgaaacgtttcgataatttagagttaaaagaaggtaatgacatttcactaacatttgcacctgatgatgaagaagatgcattaaaacctttaattttcaaaactaaagtaacgagcttagaagatatcgataaagcagaaactaaatatgaccatactaaactcaacaaagtgaaagttttagataatgttaaagaagatttacatgttgatgaaatatatggaagcttatatcatacagacaaaggtaaaggtattcttgataaagaaggtactaaagtaattaaaggaaagactaaattcgcgaatgcagtagtgaaggtagactctgaactaggtgaagcacaattattccctgatttacaagtaaatgaaaaaggtgaatttagctttgactcacatggtgctggttttagattacaaaatggagaaaaattaaacttcacagtggttgatcctattacaggtgacttgttaagtaatgagtttgtttctaaagagattgatattgaagaaacacctgaacaaaaagcggatcgtgagtttgacgaaaaacttgaaaatacgcctgcttactacaagttatacggcgataaaatagttggattcgatactaacgatttcccgattacttggttctatccattgggtgaaaagaaagttgaacgtacaacacctaaattagaaaaataattaaataaaacagcttaatgatgtaatgaaattagtgaattaatcactgacttctacgtcattgagctgtttttttatgtgctttgttataaagcattattgaatttattttacgtgttcatattttgaaacatcaaagccgtcttgcttagctttgttgataatgtctttgattgaatgtagtcctttatcggcgaagtatgatcttaagttgtcttttgtagcttggtcagcattcttatctaataacacatcgatatagcttaattcatgttctaagaagtttgcatcatcatgtagtacgagtccattttgagaatacactttcgcatctgcttcattaccatatccaacaacgccagttgctaatacacctaccattgccgtagctactaaaacctttttaaatttcatatctatcactcctctaaaaattgtaactccatcataacactgaatattgagaaaattacgtttattaagtcgatttaatgatttttaataaatagttaaagtgacaaatattgtttaaatgcaattaatctttagtgcgatacttgtgttccttagtattgagtagtagatttcgaagatattttaattcaaatgaaacaataataaaaaaatgatgcaacataataataagtacaaatttaattaataaattaaattgattgtatatgtatattttggtaacgtaaaagagaaatatacaaaataattaattatttatatgaaaagagaatataaatgaagtataaaacagagagacgtgaaatgatgggaaatataaaaagttttgcattgtacataagtatcttgcttttaatagttgttgtagcaggttgtggcaaaagtgataaaacaaaagaagattccaaagaagaacaaattaaaaagagctttgcgaaaacattagatatgtatccaattaagaatctcgaggacctatatgataaagaaggctatcgagatggcgaatttgaaaaaggtgacaaagggatgtgggttctgtattcatctattgtatcagaattcaaaggcgagagtttaaaatcacgaggaatgatattaaagttagatagaaataagagaactgctaaaggaagttatattataagagaattgaaagaagataaaaatcatgatgttcaaaaaaacgaaaaaaagtatccagttaaattggtgaataataaaataattccaactgaagatgtaaaaaacgaagatttaaaaagagaaattgaaaacttcaaattattttctcaatatggtgaatttaagagtttaaatacggataggataacaaatatttcttataatcctaatgcgcctaactattcagctgaatataaaattaatgatgatgataataacatcaaacaattaaaaaatcgattcaatattaagtctaataaaaatcctaagttattgttcaaaggagcaggtaatataaaagggtcttctgttggatataaggagatacagataattttcaataggaacaaagaagaaagtgtttcttgtattgatagtatagagtttaaaccgagtgaaggagactataatgagtaagagtgtctataaattagatgttggcaaattaaaaaagatactgaaccgacaagcgcaatatcatttatggcgtatgaaattgaaaatgctaataatcataatttgagtaagatggcaataaaggaacagttagatagaagcgcagaaaggggcatgttcccttctaatcttgaatatgttgatagttacactgattctcttactggagtaacaacttctgcttttttaaataaagatacaggcaaagtaactcttgggatgactgggactaatatacaaggcgaagcctttaaaaagttaaaagaaggtgaattttcaagacaaaatgttaccaatgctttggaaacagttaaagatggatatgcagatattaaaatattatattctcctgcatctgatcaaaactatagatatgcgaatacacaagaatttataaataaaataaaaagtaagtatgacattgattttattactggacattcactaggtggaagagatgcggtagttctaggaatgagtaatggtattccgaacattgtggtttataatccagctcctatttctataactagtttgaatcctaattccccagatggaaaacgattgttagaattatataaaaattataaaggtaatattactaggtttgttgcagaaaatgatgcattgacagaaaatctgaagaaatataagcattatgtttttttcggtaatgataaagtctttaaaaatggtaaaggtcatgaaatggaaggctttctgaccgaagaagaacaaaaagctataaaaaaagaacttaaaaaactaaaaggttatgcagaagaaaataataagtcatttgtaaagcattcaaataatgctatctctaaattagctagtatagaattacttagagccaatatgatgactgcaaatggaggaggattatcttcttcgcagcagaaagttttagacagtttaacagctttaacaattgcgcagtcattcagtcaactgatagacgatgaaattaatcaaatcaaaaaaatgtataatgaaaagaaaaagaaatttggaaaaaattgggaagacgctcaaaaagctggaaaagctgtaggtgaagatttgagtgtaaatgaagttcttaatgctttagatgaaggtcaagtgaatgaaagtagtatggtaagagaacctgaacaaatgatatctgcaaaagaaagacaactttcaacgatagggtcttctgtatcaaattatattatgagagttagactcagtattaatgaaatcgtagataaagatcaagtgcttgcatcacaaataggtggattactatgatgtttaatcaaattaataataaaaatgaattagaagaatcatatgaatccgagaaaaaacgtatagagaatgaactgcaaaatttaaatgaacttaggcatagaactcgaaaagaaaatgaacgtagttatgatgtttttcaatatttgaagcacgaaatgaattatagtgaagatgcccaaaggaaaatgacgagaaatatagaagcgtatgagcaagaaatcaatgagataattagaaagcaagaatggaaattagaagaatataaagaagacttaaaaaagtcttatgaaaagcagttagataaactaagtgactgataatttggaggagattaaatgactctaatagaaccagatatgaccttaagaatgccagatataagtactacagtagaaacacttaatctcatatctaaaatgaatgctcaaaaagaaaatattcgcacagttattgcacctgaacataagcataaatacaaagatattgaaaacggattaaaaggtgaagaaaaagtattaattgaacaaatggcgcaacattgcgaggcttttaaagctaattttaaaggcgcagctcaaggagattgggttaaaagtgccatgtctgagatagacagcattaaggatgacctgaaaaaaattaatagctaaactacatatcattatactaaataaagcgaccaatgttcagtgtattcacaactgacactaggccgcttctttttaatttattttatttccatgtaaagtaacgctctcttaatcgaaatatcacactcacaattgtaaaaacacaacttaaattactgtcccgcattaaacatatccacattccaaacagcaacaacaaaatcctcaagtaccaaaagctatgaccactttatcaaaatcaacgcaagttaacctctcctgaactacccgccataaatcatcttcaacttacaaaccataaagcgctgcagttaagtattgaatggcatagccaattgaaataaaaatagcaatcgttataatagcactgccaatggtatataaagtatgtttcgtagataatccttcagtctttgaaccaaaaacactgagtagaataaatgcaataccaatgatatataaaactaaaatgacaaataacatgtttatacacctcgattctctctcgtgagatatatctttgtctctattataaagtaaagtgctcaataatttaattaagtatactatttttttattatcgaagattgcgaaaggtgaaatgctcctatataatgtaaaacggaattattcctatttacaaataaattgaagtgagggtatatatatggctaaaattccagttacggtattaagtggttatttaggctcggggaaaacaacgttgttaaatcatattttacaaaatcgtgaaggtcgacgtatcgcagtaattgtaaatgatatgagtgaagttaatatcgataaagatcttgtcgcagatggtgggggactatcgcgcacagacgaaaaattagtcgaactttctaacggttgtatctgttgtacacttagagacgatttattaaaagaagttgagcgtttagtgaaaaaaggtggcatcgatcaaattgttattgagtcaacagggatttcagagccagtacctgttgcacaaactttctcatatattgatgatgaacttggcattgatcttacagcgatttgccgtttagatacaatggttacagttgtggatgctaaccgcttcgtccatgacatcaactcagaagatttattgatggatcgtgatcaaagcgttgatgaaacagatgagcgttcgattgctgatttattaattgaccaagttgaattttgtgatgtattgattattaataaaattgacttaataagtgaagaagaactagcgaagttagaaaaagtgttaagtgcattgcaaccgactgctaaaattattaagacaacaaattctgaagtagatttaaaagaagtcttgaatacgcagcgttttgattttgaaaaagcgagcgagtcagcaggatggatcaaagaacttgagtctggtgggcatgcatcgcatacacctgaaacagaagaatatggtatatcatcgtttgtatataaacgtcgtctacctttccatgctaaaaggttcaatgattggttagaaagcatgccaaataatgtcgttcgatcaaaaggtatcgtatggttagcacaatacaatcatgtagcatgtttattatctcaagcagggtcatcttgcaatattcatccagttacatattgggtggctagtatgtctgaagcgcaacaaacgcaaatattagcagaacgccaagacgtcgcagctgaatgggatccagaatatggcgatcgtcatacacaatttgtcattattggtacagacttagatgaaggtgcaattacaaaagaactcgatgcatgcttagtcaatgcgcaagaaattgatgcagattggcaacaatttgaagatccatatcaatggcaaattagaccggcacgataagttgaatgaagtgtaatcatttttaaattgtggcttaattgtttgcaatttatgacaattaataaaaagttaagatgttcttaggatctttttgttttcaatctatctaaagtgtgatagttttgataaagcagaaatttgcattttatccatagggctaggacatgtatgtgtcttagtcctttttatatttgcgttgatgaaaaatgacaaaaccatcgtaccaactgttaattgaaagtacaatcattgtttaaaggtcataaaaatgagtgaagcaaatgcagctatcaatgtactattactgcttacagtcacacgagtgtttcagcctaaacgtgcaatgaaattctgcacgcgtccaatatatcatgcgctagatcatgaagatcattaagatttcacatgccaaatcatgaatgtctcagacctcgagtatcaaacataaaacacgccacaaaaatataacgcgtcagactacaaagatcacgaatattccgtacgtcccactaagaacatcctatacaaaaaacaccaagaccatttatttgcaacaaactacccagactcatctcacatcaataaatcaacacaaagcaaagccaccatccctattggtatagtggcctgagaattttaagtattcaattcgcttaaattattttgcgaaaatgtcgataattgctttgatgattttaatgatagtacctacaatagccatcgttttgtcctcctgtatgttgatttaacatagtgatgagttgttgatcgttaatgtttgagattagtagttacctaaaaatttaccaagtaaatctttaaagaatttgaataattttgctacgaattccatgtgaatggcccccttcaaataagatgttcatatctatgatatttttataacttacttaccagtgaatttctcaattaatcctttaatgaatttaatgattcctgcaatgatacccatgtgaaagacctcctttgtttgttatgaaaacttatttaccagtgaattgttcgattaagcttttgataactttaatgatgccagcgatgatacccattaagattacctcctttgcttatgagttaacttcattgtacatagttatcttgtgcgtaattgatttttttcctaacttgaattgttatgatcataactgcgaattttttattttaaaaggacgggaaatactgcctaactgtacaggtgcatttacaaaatctttacaatcattagtttagtggggttaaggtcatgaatttgacatgaagcagaaatttaattatattttatgttataagtttaaaacgaataacacgttaggtctcgtctaggcaaagcatatttatgaagatgaattgaacagacagaagtaacattttatatacatatgtgcatgggagcacgcttaaagagaacagtgtaacaaggtatatcaacataccatggtgcagtgtctagttaaactgaaacctgcaatagtaaattttctgccattatgtacagaatctactattgtaggtttttctttttatacataagcattatgcgagagattagaaataaggaggttatgcagtgttaagttttcaattgctattttcactgtttgttattgcgcttatcattgcattgataagtggcttgttgtttttagcaccagttatgccaatgagatatattaaattacatttatacatactagtcatgccagtattatttgcagtcattggctttttcggtattcatggtcaacatgtcttaggtccatttaaaatagatcgtttatcttggttattagctggctttgtaatggcgcttggctttattattcaaaagttttcaatgcgatatttactaggtgatcatcattatagacattactttccattgttcactgcgattacatcgtttgcatctttagcatggatgtctgaagacttaagactgatggcactctgctggggtatgacattattatgtttaacattgctgatgaacgttaatcgtttttggaaagtgccacgtgagtctgcgaaattatcaagcatgacatttttatgtggttggcttgcattcgttggagcaattgtatctatttatattgcaactggcgagtggcgggtaccacaacatatagcgcatccgacatggtcattgttgacgaatgtactacttgtattagctgtcatgataccggcagcacaatttccttttcatcgatggttgattgaatctgtaacagcaccaacgccagtatcggcaattatgcatgcaggaattgtgaatgcaggtggtgttattctaactcgttttgcgccgatatttgataatggatttgcgttatcattattacttatcctttcaagcatttctgtattgttaggatcgggtattagcttggttcaagttgactataaacgccaattggtgggctctacgatgagtcaaatgggctttatgttagttcaatgcgcacttggtgtatattcagcagcgattatacatttaatattgcacggtatttttaaagcaacattatttttacaatcaggttctatcgtgaagcgattcaatattccaaaacaagcatctgctaaagacgcttatggctggattgtcatgggacgtgtattagctattatcgtggcatttctgttttggatgagtagtgacagaagtgcatatgaagtgttaagtgcactcattctagcatggtcattacttgtatcttggaatcaaatggtagcctttagtaaagggcgtatggcacgtctggttggcatgattttgatttcaattgtgacatttatctacatcatcacacataattatttttacgatgtattacaaaatataacaacacatgcgacaacgccgcctacaattagtgtcatcattagtgttgtcatattaatatttggtagtttattaagtatctgggtagcgcgtcatcgatactctaagacttttgcggtattgtacgtgtggttagttaatctaggagaagcacgctcgaaagcgatagaaagtcatccgaattatttgaagaagtatttataggaggtgaaaggtatgacaacacagttaaatatcaattcagtcattgaaaatgcgaaacgtgttattacaccattatcaccgatttcgatttttgcagcacgaaatccatgggaaggattagaagcggatacgtttgaagatgtcgcaaaatggttacgtgatgttcgcgatgtggatattttcccaaataaagcattaatagaaagtgctgtggcacgcggtgaattagacgaaagtgtctttaatcaacttgttactgatatgctacttgaacatcactacaatatcccgcaacactacatcaatctttatattgataacattaaaacattaaaagacgtacctgcatcatacatgaatcattcaaatgttgatgttgttgctgatctactattagaaaaatcaaaacgtgatatggctgaatcatatcatcactatgatgtacgtccgatgagtgatgcaataatagatgaacaaggtgagccacttagcgaacaagtgaatcgtcaaatgattaaatggacgaaactttatatcgatcaatttctatcgagttggacaatgccgaagcgtgagcaaagtttttaccatgcatggttgcatttagcgcaacatgaccatagttttactaaagcacagcgccaagtgattaaaggcttacccaatgatcctaaaatgacgatagagtcagtattaaatcatttttcaatagcgcaggaagactaccaagcttatgttgaaggacatcttttggcgttaccgggttgggcaggtatattatactaccgctcacaacagcatcactttgaacaacatttgttaacggattatttggccattcggttagttgtcgaacaattgctagttggtgatgagtttaagtcagtcactaaagattgtgaaagcagatcggaaaattggtttaagcaaactgttgcatcatggtgttactacagtgatatgcctagcgatgtattactacaacatgacgtcaatgaaattcaaacgtttattcattttgcagcaactatgaataaaaatgtatttaaaaatttatggttgattgcctgggaaatgacatacgaatctcagttaaaacaaaaaattaaagcaggtcatgaaagtgtggcgggcgcattagatgtaaaccaagtaaatgttactgaaaatgacaacgctaatcagtcacattcagtatcgttaaatgccacacaagcagttgatgaaaataatagcgagctaaatcaggtgggcacatcaacgaaagcgcaaattgcattttgtatagatgttcgttcagaaccatttcgtagacatatcgaagcagcagggccctttgaaacgattggtattgcaggtttttttggattacctattcaaaaagatgccgtagacgaacaattcaaacatgattcattacctgtcatggtaccgccggcatatcgcattaaagaatttgcagaccgctacgatatgaatgtttatcgacaacagcaacagacaatgtcatcgatgttttacacatttaaattgatgaaaaataatgttatgcctagtctgttattgcctgaattaagtgggccatttttaagcttgagtaccattgtcaattcgattatgcctagaaaaagtcgcgcgtctttacaaaaaataaaacaaaaatggttaaaaaagcctgaaacaaagttaacgattgatcgtgagtttgacagaacatcagacttacctgttggatttactgaacaagagcaaattgatttcgcgttacaagcgttgaaattgatggatttaaccgaagcatttgcgccgttcgttgtgttagcaggtcatgctagtcattctcacaataatccacatcacgcatcacttgaatgtggggcttgtggtggtgcatcaagcggttttaatgctaagttattagcgatgatatgtaatcgtccaaatgtcagacaaggattaaaacaagcaggcgtgtatattccagagactactgtttttgcggcagcagaacatcatacgtctactgatacattggcatgggtatatgtgccagacacattatcagctttagctctagatgcatatgaatcattgaatgacgtcatgccgatgatttctgaacacgcgaatcgcgaacgtttggacaaactgccaacgattggtcgtgtgaatcatccagtggaagaagcgcagcggtttgcaagtgattggagtgaggtacgtccagaatggggcttggctaaaaatgcatcatttataattggacgacgccaattaacaaaaggcattgatttagaagggcggacatttttacacaattatgattggcgtaaagataaagatggcaaattgttaaataccatcatttctggtccggcgcttgtggcacaatggattaatttacaatattatgcgtcgacagttgcgccgcatttttacggaagtgggaataaagcgacacaaaccgtcacgtcaggtgttggtgtcatgcaaggtaatgcgagtgatctgatgtatggcttatcatggcaatctgttatggctgctgatcgaacgatgtatcattcgccaattcgtttgcttgtcgttgttcaggcacccgattttgttgtagctagactactcgcgaataatgagcatttcgctaggaaggtgtctaatcattggctgcgtttaatgagcgttaatgaggaagggcgttttaaaagttggatttaacgatgaaatgttgcgatgctaagtaactaatatatcatcatatctacaatgttctagcttcttaaaatatactaaaaatgataaacttaatgttatagttgatgtcgtgataacgatacaaagatgaagtaatcaattttaatattattggagttagtgatatgaaaagaacgaaaggtgaaatcgaagctgaaatcagtaaagccattacgcaatgggaaaaagatttccttggcagaggttccttgtcggttaaatcagacattttaagagatatggtgattattagtttacaaggtatcttaacgccagcagaatatcgtgtgtgtagtacgaatgaaggattattaaatattaaacgaacacgttctgaattagttgaatccggtgagcaagatttgaatgatatcatttttaaaattacaggtatcaaagtgatgagcttccatagtgatttaagtacagttacaggtgaacgtattatcgtattcaaacttgaggataatttggaaaagcatatttaagaaggttaggtatgcttctgcaggcttattaaagctatagaagtatgcttggttaaacagcgcaacgccatatatttgggtgtgctgtttttctattatatgatgtgtttatcatgtgtatgtatgcattggtttgaatatagcccgtgaaaggtgtatgtcataaaatttgtgaatggtgacaagtcaacgcaagcatatttgttgcgagacatgcccactatccttttacataaagagtatatgtgtgacgtaggcatataatcgataaagtatacctaaaaaattaggtataatgaccattgttgcaataagtttttcggccttgaaaccgataacgcatagtataataggaataaaatataatacaaatatccagtaaatcaaatttgaaaacgatggatgtataggggtaaagaatctaactaatgtaatgattaacgctatatagacaaaaattactctattgatacgccctaccccctctgtataataaatatagatcgtactaaattgaaaatagcaaaatattgttatttcaattatacaatgttttatttgcaatatacataacaatatgaactttataatttttatattgtcggtaaagtgaaatttgtggcacattgatattatggataacatttgtaaaatgaaaatgatgatacgaggagattgtaagatgatagataaaaaattaacatcaccgaaaatgacagtgcctttatttttaatcgcgctgattgtatttataggtatgttttacagtgtagtgacaaatcaagaatggcttaaaaatatagatatgggatcattaacatggtttacagattatttcggtgagccacaacgccagtatgttaacaatttatttaattactatatgacgtttagtgcggaaattggagatgtcaaaggtgtcgtgttgatttccattatcgtcacaatcatactgtttattaaacagaggcatttagcggtttggtttgtgacatatttggtttcaggtgtcatcatgaacaaattaattaaagatactgttttacgtccaagaccatataatcatttagccgttgatacaggcttttcatttccgagtggacattctaacgccagcacattattatatttcgccttaatgatcattattatttcagttgctgctaagacaatgacaaaagtgttgagtgcgctggttatgggaatattatggcttagcatattattttgtcgcctttattttcatgcgcattacttttcagatgtcattggcggcacgtcactagcaatcatttgggtagcgttattcttaatggtatacccatactttattaatcatcgacgacaacgcgtttagcaaacatctttagacatagtggaggtatatagaaaaatgagaattaaaacaccgagtccatcttatttaaaaggcacaaatggacatgcgatattattattacattcatttacaggtacaaatcgggatgtgaagcatcttgcagctgagttaaatgaccaaggatttagttgttatgcaccgaattatccaggtcatggtttattattgaaagatttcataacatataatgtagatgattggtgggaagaagttgagaaagcttaccaatttttagtcaatgaaggttatgaatctatcagtgcaacgggtgtgtctttaggtggattaatgacattaaaattggcgcaacactatcctttgaaacgtatcgctgtcatgtcagcaccaaaggaaaagagtgatgatggcttaatagaacatttagtttattatagtcaacgcatgtcgaatattttaaatctagatcagcaagcatcgagtgcgcaattagcagcaattgatgattatgaaggtgaaattacgaagtttcagcattttattgatgatatcatgacaaatttaaatgttgttaaaattccagctaatatattatttggtggtaaagatgcgccatcctatgaaacaagtgcacactttatttatgaacatttaggatcagtagacaaagaattaaatggtctgaaggattctcatcatttaatgacgcatggagaaggcagagatattttagaagaaaatattattcgctttttcaatgctttaacataattgaagattttaaaaattaacacttgagtgacgatgttattatatttgtcatttgagtgttttttgtggcgtgatagtatagggaacttagacaaagttaatttgtattgtgatgtcgtggaaatattatgtagttatacctgaagttgatttgtattgtgatgttgtgggaattttgtgggcattgtacctgaagttgttatgtggcgagatgttggggatatggatggtgttgtatgtggcgagatgttggcgcaagtatacagcgttgaaccagaaattttaatgtagcgtaatgacaacacgttacaagggatttcctatattatgataaactcaggcgctaccgtattaatgaaacaattttgatgcaggtgtattgcatgttatttacatacatgttagagtgttacttaaacacgtagacgctttaacgctttaaaggagatgtgaatgatgaaaagacaacaatcacaatggaagtcatcaactggatttattttagctagtgcgggttctgcaatcggtcttggtgccatgtggaaattcccatatatggcagggatctatggcggcggtgcctttctagctatgttcttaatattcaccatttttgttggattaccattactcattatggaattcactgttgggaaaatgggacggacatatacaacacaaatatatagtaaattaactggtaaaaaatggctcaatatcattggctggaacggtaatttggcagtgtttattttatttggcttctatagtgttattggtggttggattgtcatttacatcggacaagtattatggcaattagttatatttcaacgcatcaatcatctccaagaaatgaattttgaagcggtaatatcaaatccttggttaaccgttctagggcaaggtatattcatattcgctacgatgattattgtcatgttaggtgttgaaaagggattagaaaaggcatcgaaagttatgatgccgttgctgtttgtctttttaatcatcattgtgattaagtctttaacattagatggtgccttagaaggtgtgaaatttattttacaaccaagagtgtcagagattactgctgatggaatcttgtttgcgctaggtcaatcattctttacgttatcattaggaactacaggtatgattacttatgcgagttatgcctctaaagacatgacgattaagtcatcagctatttctatcgttgttatgaatatctttgtatctgtattggcaggcctagctatatttccggcgttacatagttttggctatgagccacaagaagggcctggattattatttaaagtactgccaatggtctttagtcaaatgcatctaggcacattattctatttgggattcttagtgctgttcttatttgcggctttaacgtcatctatttctttattagaattaaatgtttctaacttcacgaagaatgacaatacaaaacgtaaaaaagtcgcagtgatcggtagtatattagtatttatcattagtattccagcaaccttatcttttggtatcttaaaagatgtaagattcggtgcgggaacgatttttgataatatggatttcatcgtttcgaatgtattgatgccattaggcgcattaggtactacgcttgtcgtaggacaattattagataaaaagttattacaacaatattttggtaaagatcgatttagattattcagtggttggtattacttaattaagtatgcgatgcctgtcgttattattttagtctttatcgtgcaattatttagttaatatatagaagcatctgacacacaagtatttgtgttgctcaggtgtttttttgtttggaattgaaaattttgtactggttctgaattaatcgaaacttagataattgcaaaataacaaaatgtcgtttataattcttatctgaaaagtaagaattaaaattgagacatgaagaaaggtttcattcatttgatcggcatgtcagatgagggtgcatctatgattacttatgatttaattggcaatacaccattagtactgttagaacattatagtgatgataaagttaaaatttatgccaagcttgaacaatggaatcctggaggcagtgttaaagacagactcgggaaatatttagtagagatggcaattcaagaagggcgtgtgcgtgcaggtcaaactattgttgaagcgactgctggcaatacaggcatagggttagctattgcagtaaatagacatcatttgaaatgtaagatctttgcgccgtatggtttttcagaagaaaagattaatattatgatagcgcttggtgcagatgtttcaagaacgagtcagtctgaaggtatgcatggggcacaattagctgcacgttcatatgctgaaaaatatggtgccgtttatatgaatcaatttgaatccgaacataatccggatacatattttcatacattgggacccgaattgacttcagcattacagcatattgattattttgtggctggtattggctctggcggtacatatacaggtaccgcacgttatttaaagcaacatcacgtgcaatgttatgccgttgagccagaagggtccgtgttaaatggagggccagctcatgcacatgacactgaaggtatcggttctgagaaatggccgatatttttagagagaagtcttgtagatgggatatttacgattaaagatcaagatgcctttcgaaatgtcaaaagtttggcaaagcatgaaggattattggtaggcagttcttcaggtgcagcattacaaggtgcattgaatttaaaagcgcaattatctgaaggtacgattgttgtcgtatttccagatggtagcgatcgatatatgtctaaggaaatatttaattatgaggagaatgattatgaataagaaaacgaaattaattcacggtggacacacaacggacgactatacaggtgcagttacaacaccaatttatcaaacaagtacatatttacaagatgatattggtgatttacgtcaaggatatgaatattctcgtactgcgaatccaacaagaagttctgtagaaagcgttattgcgtcattagaaaatggcaaacatggctttgcatttagttcaggtgttgcagcaatcagtgcagttgttatgctgttggacaaaggtgatcatattattttaaattcagatgtatacggcggtacttatcgcgcattgacaaaagtatttacacgatttggcgttgaagtggattttgtagatacaacgcatacagattcaattgtacaagcgatacgcccaacaacaaaaatgttatttattgaaacaccttctaatccattattacgtgttactgacattaaaaagtctgctgaaattgcgaaagaacacggtttgatttcagtcgttgataacacatttatgacactttattatcagaatccattagatttaggcatcgatattgtcttacattctgcaacgaaatatttaggtggacatagtgatgtcgttgctggtttagttgcaacatcggatgacaagcttgcagaacgtttagcatttatttcaaattcaacaggtggcattttaggacctcaagatagttatttacttgtgagggggattaaaacattaggtttacgtatggaacaaattaatcgcagtgttattgaaattattaaaatgttacaagcacatccagctgtgcaacaagtgttccatccaagtattgaaagtcatttaaatcatgatgtccatatggctcaagcggatggccatacaggtgtgattgcttttgaagtgaaaaatacagaaagtgccaaacaattgattaaagcaacatcgtattacacattagctgaaagtttaggtgcagtggaaagtttaatttcagtacctgcattgatgacacatgcatctattccagcagatattcgagctaaagaaggtattacagacggacttgtaagaatttctgtaggtattgaagatactgaagatttagtagatgatttaaaacaagcactagatacgttataaataatagcagcactggcatatattttgagttcaacgtttgttgttcttgaatatgctagtgcttttttgtgtggtgttaatatttcgtaattgcattgtggaggattgctggtcatttttattcatttaatttgataaatgtcatagtagtctcacaattcgtcattgtcacaaggtattatttttttaattttttagaaaattcggcaaattgtattgacgatatatgcaattttacatataatgctcttattcctagtggattaataagaatttgtaggaggggcgatgatgattgagtttcgacaagttagtaaatcatttcataagaaaaagcaaacaatagatgctttgaaggacgtatcatttacggtcaatcgcaatgatatttttggtgtgattggatatagtggtgcaggaaaaagtacgttggtaagactcgtgaatcatcttgaagctgcctcgaatggacaagtgattgtagatggacatgatattacgaattatagcgataaaatgatgagggatattaagaaagatatcggtatgatatttcagcattttaatttactaaattcagctacggtatttaaaaatgtagctatgccgctcattttaagtaagaaaagcaaaacagaaattaagcaacgagtaacggaaatgcttgaatttgtaggattgagtgataaaaaagaccaatttcctgatgaattatctggtggtcagaagcaaagggtggctattgcaagagcgcttgttactaatccgaaaatactcctatgcgatgaagcaacaagcgcattggatccagcaacgactgcttcgatattgacgttattaaagaatgtcaatcaaacctttggcattacaattatgatgattacacatgaaatgcgcgttattaaagacatttgtaatcgtgttgctgtaatggaaaaggggcaagtggttgaaacaggaactgttaaagaggtgtttagtcatcctaaaacgacgattgctcaaaattttgtgtctacagttatacagactgagccaagtccatcattgattcgtcgattgaatgacaaacaagttggcgattttaaagattataaaatcttcgtcgaggaaactcagatgacacaaccgattataaatgacttgattcaaatttgtggcagagaggttaaaattttattttcatccatgtcagaaatacaaggtaacaccgtatgttatatgtggcttcgatttaatatggatcaacaatttgatggcacggcaataaatcaatatttcaaagagaaaaatattcaatttgaggaggtgcattaacatatgtttggttctgatttagacagtgcacagttattacaagcattatacgaaacactatatatggtatctattgctttatttttaggagcagtgattggtattccattaggtgtcttattggtaattactcgaaaacaaggcatatggcccaatatagtgatacatcaagttttaaatcctataatcaatattttaaggtcactaccatttattattttgttgattgcgattgtgccattcacaaaattagtagtaggtacttccattggtacgactgctgccatcgtgcctttaacagtatatgtggcaccttacattgcaagacttgttgaaaactcattattggaagtagacgaggggattattgaagcggcgaaagcgatgggcgcttcaccactacagatcattagatattttttaattcctgaagcgttaggttcattagtattagcaattaccactgcgattattggacttattggaagtacggcgatggcaggcgctgttggcggtggtggtataggagacttagctttagtgtatggttatcaaagatttgatacgacggtcattattattaccgttattgtattagtcgttattgtccaagtgattcaaacgctagggaatgtcctagctagattcatacgtagacattgatgatatatagtgaagattttgaaaggaattgatagaatgaaaagattgattgggttagttatcgtagcacttgtattattagcagcgtgtggtagtaacaatgataaaaaagtaacaattggtgtcgcgtcaaatgacactaaggcttgggagaaggttaaagaattagctaaaaaagatgatattgatgtggagattaagcacttctccgattacaatttaccgaataaagcattaaacgatggtgatattgatatgaatgcattccaacattttgcatttttagatcaatataaaaaggcgcataaaggaacaaagatttcagcattaagtacaacagttttggcaccgttgggcgtttactcagataaaattaaagatgtcaaaaaggttaaagatggtgctaaagttgtcattccaaatgatgtgtcaaaccaagcacgtgcacttaaactattagaagcagctggtttaataaaactgaaaaaagatttcggattagcaggtacagtgaaagatataacgtcaaatccaaaacatttaaaaattactgcagtagatgcacaacaaactgcacgtgctttatctgatgtcgatattgcagttattaataacggtgtagcaactaaagctgggaaagatccaaaaaatgatccgattttcttggaaaaatcagattcagatgctgtaaagccatatattaatattgttgcagttaacgacaaagacttggataacaaaacatatgctaaaatcgtagaattgtatcattcaaaagaagctcaaaaagcgttgcaggaagatgtcaaagatggagagaaacctgttaatttatctaaagatgagattaaggcaatagaaacgtcattagcaaaataaattatattacgtcctacaagcatagttcatgcttaagtttgtagggcgtttttgtttgcctataaaaatgtttcaaaagacagaaagggattgtaatcattttatagtgaaatattatgaaattgtaataatttagatattgtaaaatctaataagttgtaataattttaagaggtaattataaaatttgatgacacagtatatgatttttttgtaatcataatgtcatcaaacatcaacctattatacataattaaatcgtataatgatgtagtattcataaattcggataaaaagaatgttaggaaagttatgcaagaggaggattttaaagtgcaaaaaaaagtaattgcagctattattgggacaagcgcgattagcgctgttgcggcaactcaagcaaatgcggctacaactcacacagtaaaaccgggtgaatcagtgtgggcaatttcaaataagtatgggatttcgattgctaaattaaagtcattaaacaatttaacatctaatctaattttcccaaatcaagtattaaaagtatctggctcaagtaattctacgagcaatagtagccgtccatcaacaaattcaggtggcggatcatactacacagtacaagcaggcgactcattatcattaattgcatctaaatatggtacaacttaccaaaacattatgcgacttaatggtttaaataatttctttatttatccaggtcaaaaattaaaagtatcaggtactgcaagctcaagtaattctacgagcaatagtagccgtccatcaacgaattcaagcggtggatcatattacacagtacaagcaggtgactcattgtcattaatcgcttcaaaatatggtacaacatatcaaaacattatgagacttaatggcttaaataatttctttatttatccgggtcaaaaattgaaagtaactggtaatgcatctacgaactcaggatctactacaacgacaaatagaggttacaatacaccagtattcaatcaccaaaacttatatacatggggtcaatgtacatatcatgtatttaatcgtcgtgctgaaattggtaaaggtattagcacttattggtggaatgcaaataactgggataacgcagcggctgcagatggttacacaattgacaatagacctactgtaggttcaatcgctcaaacagatgtaggttattatggtcatgttatgtttgtagaacgcgtaaataacgatggtagtattttagtttcagaaatgaactattcagctgcaccaggtattttaacttacagaacggtaccagcttaccaagtaaataattatagatatattcactaaagtcttacgtatataaatatatataatgaattcctattacatttcacaagctgaaaagttggatttaatcctaaactttatggcgtgactatcaaagtcgtgattattgtaataggaatttttgtataagaaaaaggattgatcgaatgaacgtcatgctctatgttcgaccaatccttttctgatttagtattcatgctttactttgcgaatgcttgtaaataatctagcaccgtttgttattaaagtaacaactgccactgcttttttgaacttgcgtggtgacttaattgaaatgtaaaagtctaacacggttcctacagtgcttaaacctaatgaaagatatactaattttttatttttagcatgatatttatagccattgtagccgtcgactatgaaacctgcgacatttagtaaacttgataaacgttgtgatttggaacgttttgccataataataattccccctagtatcttctgtttatatggaataattgggtgcgctgaattgctaacgttttgcgctataactactcatatatgataacataattgtacagtataatttgaaaaattgatttcacaaagttggggtgtcaaagatgattaaatgtgtctgtttagtagaagaaacagctgataaaatattgcttgttcaagtaaggaatcgcgaaaagtattatttcccaggtggtaaaatagaagaaggggaatcaccagtacacgcgctgttaagagaagtaaaagaagaattaaatttaacattaacaatggatgaaattgaatatatcgggacaattgtaggtcctgcatatccacaacaggatatgttaactgagttaaatggatttcgcgcattaaccaaaatcgattgggaaaacgtaactatcaataatgaaattacggatatacgctggattgataaagataatgatgcgttgattgcgcctgctgtcaaagtttggattgaaacgtatgatggtaaacatgacaaataatgacaccatcatgttacgacattatgtcccacaagattattcgatgttagaagcttttcaattaagtgaaagtgatttgaagtttgttaaaacgccagaggaaaatattacagctgcaatgtctgataatgaaaggtatcccatcgttgtaatggatggcaggcaatgtgtggccttttttacattacatcgtggaaaaggtgtcgcaccatttagcgataaccaagatgcagtatttttcaggtcatttagtgttgatcaacgttatcgtaaaagaggaataggtaaagtggtaatggaaaaattggcgtcatttatcacttcaacatttcaggatattaatgagattgtgttaacggttaatactgacaatccacatgccatggcactttatcgccaacaaggatatcaatatatgggagatagtatgttcgtcggaagacctgttcatattatggcgctaactataaaataaattaaatttaaaagcatctttactcatcgtcgaccacaacaattaatgatgaataaaggtgctttttgttatagaccaccggacaatttactatagtaaaaagcgacctagggaacaattgacatatatccacaggtcgcttaacttaagttatattgctagttgcgattaattgatagactcatcatttttgcgctgtcgagatggtctttttattaaaaatgccgtaatccaagccgtaatcggaatactgattgcaacggcaataccgcctaaaataatagaaataaattcttgggcaaatattttcgagtttataatatgaccaaatgaatatttaagtttgaaaaaccaaataaataaagcaagttggccaccaaaaaaggcaaggtaaatcgtgttcgcagatgtcgctaaaatttctctaccaacacgcatgccagattggaataattcgtattgcgtaagtgttggattcacttgatgcaattcataaatgggtgaactaatggtaatcgttaaatctatcacagctgcaataacagcaagaataatagtgaacaccataaattgaatcatatcaatgccaatattcattgaatacacatatgtttcatcttgttgttcggttgaaaagccttgtagatgaccgaagtagaccgataaataaatgagtgtaatcaacaatattgttgtaacgatagtgctgataaatgcagcttgtgttttaacattgtaactattgagtacgaataaattacaagcgccaataataatgcagaaaaagaatgtgacgacataaatcggtacgccaaaaataatcaatacaatactaataattaaaatagcgaaatttaaaaatagggttaaataagagatgaatccctttttacctccgaaaattatcatcagaaagaggagcaataacgccaatataaatacagcattcattgtttcgccctccttaatgtttcaaatatttccataaacaatattgtgataggaattgtaagtacgatacctataccgcctgttagtgcgcgcgcaatttctaacgaccaattcatcgaaatagtataagtcactgtattggcattttttaaaaagattaaaaacataggtagtgcaccggataaatatgagaataataagatgttagtcattgttcccataatatcttggcctatgtttcgcccagcaagcgcccatctcctcattgaaatgtgcggcgtacgctgtaaaatttcatgcataccactagcaattgtaattgcaacatccataatagcgccaagtgaacctattaacactgaggctaggaagatatctttcggtggtaatgataaaaagttcatcgtttcatatttaatgcctttaccatctgtcatatatatgattaattctgttaaacctatactcaaaaaagttccgataattgtactggctatggtaatgagtgtacgcatatgccagcctgtaacgagcaataaagtgagtattgttgaacagatcatggcaatggtcatgagtaagaataaattaatattgctatgttgaatatgaatgtaaattgcgattaatatggcaatagaattcaagattaacgataaaatcgattgcagtccgactttgcgaccaaccaataatacagttaataagaacaaaccagtgatgataaccgttaaggtatcacgcttcttttctataatataagcatcactcggcttgttagaaatatgtaataatactttttcgtgtgtgcgaaatgcctcagaatctgcttgcgatttgacgtactgatgattaatcgtcgtcgtttctccagcaaattgaccatttaatattttgacttttaattgatttttatatttaatatcacgattattttgtgcatcttttgtaggtgtcgaagaaacatgtttgacatctataatttgaccaattggtttgttgtaaaagttctcattattgaatgtgaataaaatagcaccaatgaatgcgatgcagaacaaacctaaaattatattaaatggctttgtaaataaatttctatatttcaaaaacaaaaccccaattctatgaatgaattaatatggtgattatacgcccttaattttttattttcaaagatattactgtgaaatgtataacgaaaatcatcattgatagagtcgaatggcttaatggaatgtagacgttttagtcattaattgttgaatgagtgttaataagataccaatatcactcttcgtataaggttctttcgtaatagcacatatcgttctttttaattcagtatggtctaattttatatctatacatgatttagattctggtaaatgtatattttgtgatgaaatgatgtaaccttctttttgacgaaggagatactgcgcaagtggttggctactgattgtgtatacatctgatttagtaatcttacgcaattgtttttttacagattcggcaaatggtcccaagcaataaatatgactatgctcaaactgaattaatggtgggtgtgtcgccatcgtgattggatcgtctgaaggcgcatataaatgatagtgctcttcgaataaaggtagcatatgtaattgtttgtgtttacgtatttctggtgtaagttccgtgaaaccaatgtctatatttccatttaatacgctatttataattgtgtcatgttctaataaattagggatgacatgtgtatcattttgtaaatgaaacgtttggataagtggtagtaacatgtgggatacgtcactctcattatagccaatgtagatgcttttatttttagttaatccatgactttgaaattgttcaatcgtgctatctaaatgttcaataatacgcagagcttcattaaataataatttcccttcagatgtgagcgtaatattacgtccttgctttttaaataatgacacattaagttcttgttctaataatgtaatttgacggcttatcgctgattgagcaatgtttagttcaagtgctgtttcggagatatgttctcttttagcgacctcgataaaatatcttaattgtttaatttccatagcgatataggcacctccaaaaatgagtgttttgtaactattatagcaatattattgataaatgttctattttttagatgaatatcttctattttatatattgaacagataaattttttagattatagtaattatcattaataactaatatcagaatattctaaaaaaggggtgtgcatcatgcacaatgagaaattaattaaaggcttatatgactatcgtgaggaacatgatgcgtgtggtattggtttttatgcgaatatggacaataaaaggtctcacgacatcattgataaatcgcttgaaatgttgcgacgtttagatcacaggggcggggtcggcgcagatggcatcactggtgatggcgcaggtattatgactgaaataccttttgcatttttcaaacaacatgtaacggactttgatatcccaggtgaaggtgaatatgccgtggggttatttttttccaaagaacgcattttaggttctgaacatgaagtagtttttaaaaaatattttgaaggcgaagggttatcaattcttggttatcgtaatgtaccagttaataaagatgccattgctaaacatgtagcagatacgatgccagtcattcaacaagtgtttattgatattagggacattgaagatgttgaaaagcatttgtttttagcgagaaaacaattagagttctattcgactcagtgcgatttagaattgtattttacgagcttatcacgcaaaacaattgtatataaaggttggttacgatcagaccaaattaaaaaattctatacagatttatcggatgatttatatcaatcaaagctagggttagtgcattcgagatttagtacgaatacattcccgagttggaaaagggcgcatcctaaccgtatgttaatgcataatggtgagattaacacgattaaaggtaatgtgaactggatgcgagcacgtcaacataaattaatcgaaacattatttggtgaggatcaacataaagtgtttcaaattgtcgatgaggatggtagtgactctgctattgtagataatgcgctagagttcttatcgttagccatggagccagaaaaggcagcgatgctactcatacctgaaccttggttatataatgaagcgaatgatgcaaatgtacgtgcgttttatgaattttatagttatttaatggagccgtgggatggtcctacaatgatttcgttctgtaacggtgacaaacttggcgcgcttacagatagaaatggattacgtccaggtcgttatacgattactaaagataactttattgtcttttcatctgaagtgggtgttgtggacgtacctgaaagtaatgttgcttttaaaggtcaattgaatcctggaaagttattgcttgttgattttaaacagaataaagtcattgaaaataatgatttaaaaggtgcgattgccggagaattaccatataaagcgtggattgataaccataaagttgattttgattttgaaaatatacagtatcaagattcgcaatggaaagatgagacgttatttaaattacaacgtcaatttgcatacacgaaagaagagattcataagtatattcaggaacttgtagaaggtaagaaggatcctatcggtgcaatgggatatgatgcgccaattgcagtgttgaacgagcgaccagaatcactatttaattactttaaacagctgtttgcacaagttacgaatccaccaattgatgcgtatcgtgaaaaaatcgtaacgagtgaactttcttatttaggtggcgaaggtaacttactagcacctgacgaaacggttttagatcgtattcaattgaaaagaccggtattgaatgaatcacacttagcagcgattgatcaggagcattttaaattaacatatttatcaacggtatatgaagggaatttggaagatgcgttagaagtattaggccgagaagcagtggatgctgtaaagcaaggcgctcaaattctagtgttagatgatagtggattagttgatggcaatggctttgcaatgccgatgttactcgcaataagtcatgtgcatcaattacttattaaagcagatttacgtatgtctacaagtttagtcgctaaatctggtgagacacgagaagtgcatcatgttgcttgtttactcgcatatggagcgaatgcaattgtgccatacctagcgcaacgtacagttgaacaactgacattgacagaagggttacaaggcaccgttgtcgataatgttaagacatatacggatgtattgtcggaaggtgttattaaagtaatggcgaagatgggaatttcgacagtgcaaagttatcaaggtgcacaaatatttgaagcgattggcttgtctcatgatgtgattgatcgttattttactggaacacagtctaagttatctggtatttcgattgatcaaattgatgctgaaaataaagaacgtcaacaaagtgatgataattatcttgcatcaggtagtacattccaatggagacaacaaggtcaacatcatgcttttaatccggaatctattttcttattgcagcacgcatgtaaagaaaatgactatgcgcaatttaaagcatactctgaagcggtaaacaaaaatagaacagatcacattagacatttacttgaatttaaagcatgtacaccgattgacatcgaccaagttgaaccggtaagtgacattgtcaaacgttttaatacaggggcgatgagttatggatcgatttcagcggaagcacatgaaacgttagcacaagccatgaaccaattaggtggaaagagtaatagtggtgaaggtggcgaagatgcaaaacgttatgaagtacaagttgatggaagcaacaaagtaagtgcgattaaacaagttgcttctggacgttttggtgtaactagtgattatttacaacatgccaaagaaattcaaattaaagttgcgcaaggtgcaaagcctggtgaaggtggtcaattacctggtactaaggtatatccgtggattgcgaagacaagagggtcaacgccaggtatcggtctgatttcaccaccgccacatcatgatatttattcaatagaagatttagcgcaactgatacatgatttgaaaaatgcgaataaagatgcagatatcgcggtaaaattagtttcgaaaacaggtgttggtaccattgcatctggggtggcgaaagcatttgcagataaaattgtcatcagtggttacgatggtggtacaggggcttcgcctaaaacgagtatacagcatgccggtgttccttgggagattggtttagcagaaacacatcaaacattaaaactaaatgacttaagaagtcgtgttaagttagaaacagacggtaagttattaactggtaaagatgtagcgtacgcatgtgcgcttggagcggaagaatttggatttgcaactgcaccattagtggtgttgggctgtattatgatgcgtgtatgccataaagatacatgtccagtaggagttgcaactcaaaacaaagatttacgtgctttatatagaggtaaagcacatcatgttgttaattttatgcattttattgcacaagaattaagagaaattttagcatctttaggtttgaaacgtgtagaagacttagttggaagaactgatttattacaacgatcatcaacattaaaagcgaatagcaaagcggctagtattgatgttgaaaaactgttatgtcctttcgatgggccaaacacaaaagaaattcaacaaaatcataatcttgagcatggatttgatttaacaaatttatatgaggtaacgaagccatatattgctgaagggcgtcgctatacaggtagctttacagtaaataatgaacaacgtgatgtaggggttattacaggtagtgagatttcgaaacaatatggagaagcaggacttcctgaaaatacaattaatgtttatacgaatggtcatgctggtcaaagtcttgcagcatatgcaccgaaaggcttaatgattcatcatactggagatgcgaatgactatgttggtaaaggattatctggtggtacggtcattgtcaaagcaccttttgaagaacgacaaaatgaaattattgctggtaacgtctcattctatggtgcgacaggtggtaaggcatttattaacggtagtgcaggagaaagattctgtattagaaatagtggtgtagatgttgtcgttgaaggtatcggcgaccatggattagagtacatgactggtggacatgtcattaatttaggtgatgtaggtaagaacttcggtcaaggtatgagtggtggtattgcttacgttatcccgtctgatgtagaagcttttgttgaaaataatcaactagatacgctttcgtttacaaagattaaacaccaagaagaaaaagcattcattaagcaaatgctggaagaacatgtgtcacatacgaatagtacgagagcgattcatgtgttaaaacactttgatcgcattgaagatgtcgtcgttaaagttattcctaaagattatcaattaatgatgcaaaaaattcatttgcacaaatcattacatgacaatgaagatgaagcgatgttagctgcattttacgatgacagtaaaacaatcgacgctaaacataaaccagccgttgtgtattaaggaaagggggagatacgatgggtgaatttaaaggatttatgaagtatgacaaacagtacttaggtgaattatcactggtagaccgtttgaagcatcataaagcatatcaacaacgatttactaaagaagatgcctctatccaaggtgcgcgatgtatggattgtggaacgccgttttgtcaaaccggacaacagtatggtagggaaacaataggttgtccaattggaaactacattcctgaatggaacgactttgtgtatcatcaagattttaaaactgcttatgaacgcttaagcgaaacaaataactttcctgactttacagggcgtgtatgtcctgcaccatgcgaaagtgcttgtgtgatgaagattaatagagaatcgattgcgattaaaggtattgaacgcacaattattgatgaagcttttgaaaatggttgggtagcgccgaaagttccgagtcgccgtagagatgaaaaagtggcaatcgttggaagcggtccagcaggattaactgctgctgaagaacttaatctactaggatatcaagtgactatttatgaacgtgctagagaatcaggcggtttattaatgtatggtatacctaatatgaagcttgataaagatgtggttcgacgtcgtattaagttaatggaagaagcgggcattactttcgttaatggtgttgaagtaggcgttgatattgataaagcaacgttagaatctgagtatgatgccattatattatgtactggtgcacaaaaaggtagagatttacctttagaaggacgcatgggtgatggtatacatttcgctatggattatttaactgaacaaacgcaactgttaaatggagaaattgatgatataacaataactgcaaaagataagaatgtcattatcattggtgctggtgatacaggggcagactgtgtagcgacagcattaagagaaaattgtaagtcgattgttcaatttaataaatatacgaaattgccagaagcaattacgtttacagaaaatgcatcatggcctttagcaatgccggtgtttaaaatggactatgcgcaccaagagtacgaagctaagtttggtaaggaaccacgtgcatatggtgttcaaacaatgcgttacgatgttgacgataaaggacatatacgtggtttgtatactcaaattttagagcaaggcgaaaatggtatggtcatgaaagaaggacctgaaagattttggcctgctgaccttgtattattatcaatcggcttcgaaggtacagaaccaacagtaccgaatgcttttaacattaaaacggatagaaatcgaatcgtggctgatgatacaaactatcaaactaataatgaaaaagtatttgctgctggagatgctagacgtggtcaaagtttagttgtatgggcgattaaagaaggtagaggcgtagcgaaagcagtagatcagtatttagcgagtaaagtttgtgtataatctttgtgtgacaatgatgatgttcgcgttgacgttgtatggtgctgaattgaaaaggaagcgacttagtatctatcaacgtcacatgccatctttgtaacctaaaaataaaggtttgtaagacaactaatagattaattataagtagtgattttttacattcgttttataggtcaactgtagtggaagacaatgatttgtggtaatcatgtaatgcttaaaaacaatattgacttttacagaacgttcatatatgataaatattgtgtttaggaggaatacccaagtccggctgaagggatcggtcttgaaaaccgacaggggcttaacggctcgcgggggttcgaatccctcttcctccgccatcaatatttatattaaatactatatataatgaaggtaagtgctcaaattttgagtatttaccttttttatttgtctttgaatgggtcgtatttttggctatagaaatgataaggcattgaaatagaaaggacatttggcttttgaatgacacatggctgaatgtcttttttatttggtgatgtacgtaggagtctttgcttgggcatggaaattactatttgggtatgggtatgataatacagcttattctttaacatagtgtatgcgtttggaggttatggataatgctattgtagcgaaaattcatgctataaatgtagtcgtagccatttgattttcttaaatatctaaactagataattgtgaaatattaaaatattttcatgaaagcctttacataacttgtctagacaagttatactctttttaagacattaagggagtgaagttcatggctgtaaaaagagaagatgtaaaagccatcgttaccgcaattgggggaaaggataatctagaagctgcaacacattgtgtaacaagattgcgtttagtacttaaagatgaaagtaaagttgataaggaagcgttaagtaataatgctttagttaaagggcagttcaaagcagaccatcaatatcaaattgtcattggtccaggaacagtcgatgaagtgtataagcagtttattgatgaaacaggtgctcaagaagcttctaaagatgaagcgaaaaaagcagctgcgcaaaaagggaatccagtacaacgtttgattaaattgttgggggatatttttataccaatattacctgcgattgtgacagctggtttgttaatggggatcaataatttacttacaatgaaaggattatttggtccgaaagaactcattgtgatgtatccacaaatagctgatatttcaaatatgataaacgtcatagcaaacacggcatttattttcttaccagcattaattggttggagtagtatgcgtgtatttggtggtagtccgattctaggtttagtcttaggtttgattttaatgcacccgcaattagtatctcagtatgatttggcaaaaggtaatattccgacgtggaatttatttggcttagagattaagcagttgaattaccaaggtcaagtgttgcctgttttaattgcagcttatgttctagctaaaattgaaaaaggattaaataaagttgttcacgattcgataaaaatgttggtcgttggacccgtagcgcttttagttactggatttttagcatttattatcattggaccagttgcattattgattggtacaggtattacatctggtgttacatttatattccaacatgctggttggttaggtggcgcaatttatggtttgctatatgcaccgcttgtaattactggcttgcatcatatgtttttagcagtagatttccaattaatgggtagcagtttaggcggtacatacttatggccaattgttgcaatctcaaatatttgtcaaggttcagcagcatttggtgcatggtttgtctataaacgacgtaaaatggttaaagaagaaggtttagcattaacatcttgtatttctggtatgttaggtgttacggagccagccatgtttggtgtgaacttacctttaaaatatccatttatcgccgcaatatcaacgtcttgtgtattaggggcaatcgttggtatgaataatgtacttggaaaagttggtgttggtggtgtaccggcattcatttcaattcaaaaagaattttggcctgtatatcttgttgtaacaggaattgcaattgttgtaccatgtatattaacgattgtgatgtctaattttagtaaacaaaaagcaaaagaaattgttgaagattaataaaataaaaaaggggcgttcgttatttggacgccttttattatgttataaggtggtcatcgtgtgttgaaagaaatagattggagaaagtcagtagtatatcaaatatatcctaagtcatttaatgatacgacaggaaatggtataggtgatatcaacggtattatagaaaaattagattatatcaaattgttaggtgttgattatatttggttaacaccagtgtatgaatcgccaatgaatgataatggttatgatataagcaattatttagaaataaatgaggacttcggtacgatggatgattttgaaaggttaattaatgttgcgcatgaaaaaggtattaaagtgatgttagatattgtaatcaatcatacatcgacggagcatgaatggtttaaagcggctcgtaaatctaaagacaatccatatagagattattacttttttaaagcatctgaagatgggcctccaacaaattggcattccaaattcggaggtaatgcatggaagtatgattctgagacagatgaatattatttacatttatttgatgtcagtcaagctgatttaaattgggataatccggaagtacgtcaatcgttatatcgcattgtcaatcattggatagacttcggcgttgatggttttcgatttgatgtcattaacttaatttctaaaggtgaatttaaggactctgacaaaataggtaaagaattttatacggatggtcctagagtgcatgagtttctgcatgaattaaatcgtcaaacgtttggtaacactgacatgatgactgtaggagaaatgtcttcgacgacgattgaaaattgtattaagtatacacagccagaacgccaagaattgaatagtgtttttaattttcatcatctaaaggttgattatgttgatggtgaaaagtggacaaatgcgaagcttgattttcataagttaaaggaaattctgatgcaatggcaacgaggtatttatgacggtggcggatggaacgcgattttctggtgtaatcatgatcagccacgggtagtgtctagatttggtgatgatacgtcggaagagatgaggatacaaagtgctaaaatgttagctatcgcactgcatatgttgcaagggacgccatatatttaccaaggtgaagaaattggtatgacggacccacattttacatcaatagcacaatatcgtgatgttgaatcgattaatgcctaccatcagttgttaagtgaagggcatgctgaagcggatgtgttagcgattttaggacagaagtcacgagataattcgagaacgcctatgcaatggagtgatgatgttaatgctggatttacagctggtaagccttggattgatatttcggaaaattatcatcaggtcaacgttagacaagcacttcagaataaagattctattttctatacgtatcaaaaattaatacaattaagacatacgcatgatattattacgtatggagacattgtgccacgttttatggatcatgatcatttatttgtttatgaacgtcattataagaatcaacaatggctagtaattgcgaatttctcagcatcggctgttgatttgccagaaggattggcgtgcgaaggtcgtgttgtgattcaaactggtacagtggaaaataatacgataagcgggtttggtgcaattgtaatcgaaacaaacgcgtaaaataaattgagtggatgtgtttatatggcgaaacaaaaaaagtttatgaagatttatgaggcgttgaaagaagatatattaaacgggcagattcaatatggtgaacaaattccgtctgaacatgatttggtgcaattgtaccagtcatctcgagagaccgtgcgtaaggcattagatttgttggcattagacggcatgattcaaaagattcatggtaaagggtcacttgtcatttatcaagaggttacagagtttccattttctgaacttgttagttttaaagaaatgcaagaagaaatgggtgtcgcatatttaactgaagttgttgtgaatgaggttgttgaagcgcatgaagtgccagaagttcaacatgctttaaacatcaattctagtgaatcactcattcatattgttagaactcgtcggcttaaccaacatgtgaagattgttgatgaagattattttctaaagtcgattgtttcagacataggtaatgatgttgcgagtgattctatttatgattatttggaaaaggtattaaatcttaatattagttattcaagtaagtctattacttttgaaccgtttgatgaacaagcatatcaattgtttggtgatgtatcagtgtcttattcagcaacagttcgaagtattgtgtatttagaaaatacaatgccgtttcaatataatatttcaaaacatcttgcaaatgaatttaaatttaatgacttctcaagacgtcgtacaaagtaaacaatgatataaatgatttatacttgcaattaactattaaaatatagtaatatatatcttgccgtgctaggtggggaggtagcggttccctgtactcgaaatccgctttatgcgaggcttaaatcctttgttgaggccgtatttttgcgaagtctgcccaaagcacgtagtgtttgaagatttcggtcctatgcaatatgaacccatgaaccatgtcaggtcctgacggaagcagcattaagtggatcatcatatgtgccgtagggtagccgagatttagctaacgactttggttacgttcgtgaattacgttcgatgcttaggtgcacggttttttatttttaaaaatattaaaccgattattaagagttgaaaatatataattatagaagctactttcttgaagacaattcagcgtattatacgtggaacatgtttgtgggaagtagcttttttatatatgaagtttgattcaagtggaatggatgcgcagtttgaatgattttttacggatataaaaagtaagaagttattatttgatgataaagaaatgatggtgaaatgagggggagtaccttacaatagaattattaatgagatacgttatgattattgacaatcaaatgcctacggaggacatatgcaaatatatttaagtactttaacagagttagattatgataaatctttaaatagtattgaagaaagttttgatgataatcctgaaacgagttggcaagcacgtgcgaaagtaaaacatttaagaaaatctccttgctataattttgaattagaagtaattgcgaaaaatgaaaataacgatgtcgttggacacgttttattaattgaagtagaaatgaatagtgatgataagacgtattatggtttggcgattgcttctttatcagtcaaccctgaattgcgtggacaaaaattaggtcgtggcttggttcaagcagtagaagagcgtgcaaaagcgcaagagtatagtacggttgttgtagaccattgttttgactactttgaaaagttgggttatcaaaatgctgctgagcatgacattaaattagaatctggtgatgcaccgttacttgtaaaatatttatgggataatttgacggatgcaccacacggaatcgtaaaatttccagaacatttttattaattgttcatttaagaagtaaaggtattatcatgctataatgaaaggtaattgtttatggaggtgctaacttgaattatcaagccttatatcgtatgtacagaccccaaagtttcgaggatgtcgtcggacaagaacatgtcacgaagacattgcgcaatgcgatttcgaaagaaaaacagtcgcatgcatatatttttagtggtccgagaggtacggggaaaacgagtattgccaaagtgtttgctaaagcaatcaactgtttaaatagcactgatggagaaccttgtaatgaatgtcatatttgtaaaggcattacgcaggggactaattcagatgtgatagaaattgatgctgctagtaataatggcgttgatgaaataagaaatattagagacaaagttaaatatgcaccaagtgaatcgaaatataaagtttatattatagatgaggtgcacatgctaacaacaggtgcttttaatgcccttttaaagacgttagaagaacctccagcacacgctatttttatattggcaacgacagaaccacataaaatccctccaacaatcatttctagggcacaacgttttgattttaaagcaattagcctagatcaaattgttgaacgtttaaaatttgtagcagatgcacaacaaattgaatgtgaagatgaagccttggcatttatcgctaaagcgtctgaagggggtatgcgtgatgcattaagtattatggatcaggctattgctttcggcgatggcacattgacattacaagatgccctaaatgttacgggtagcgttcatgatgaagcgttggatcacttgtttgatgatattgtacaaggtgacgtacaagcatcttttaaaaaataccatcagtttataacagaaggtaaagaagtgaatcgcctaataaatgatatgatttattttgtcagagatacgattatgaataaaacatctgagaaagatactgagtatcgagcactgatgaacttagaattagatatgttatatcaaatgattgatcttattaatgatacattagtgtcgattcgttttagtgtgaatcaaaacgttcattttgaagtattgttagtaaaattagctgagcagattaagggtcaaccacaagtgattgcgaatgtagctgaaccagcacaaattgcttcatcgccaaacacagatgtattgttgcaacgtatggaacagttagagcaagaactaaaaacactaaaagcacaaggagtgagtgttgctcctactcaaaaatcttcgaaaaagcctgcgagaggtatacaaaaatctaaaaatgcattttcaatgcaacaaattgcaaaagtgctagataaagcgaataaggcagatatcaaattgttgaaagatcattggcaagaagtgattgaccatgccaaaaacaatgataaaaaatcactcgttagtttattgcaaaattcggaacctgtggcggcaagtgaagatcacgtacttgtgaaatttgaggaagagatccattgtgaaatcgtcaataaagacgacgagaaacgtagtagtatagaaagtgttgtatgtaatatcgttaataaaaacgttaaagttgttggtgtaccatcagatcaatggcaaagagttcgaacggagtatttacaaaatcgtaaaaacgaaggcgatgatatgccaaagcaacaagcacaacaaacagatattgctcaaaaagcaaaagatcttttcggtgaagaaactgtacatgtgatagatgaagagtgatacatgacaagcgatataatcgtatgtataatgaaagaaacatcattttattgataaatatttattgattttcaaggaggaaatggaatatgcgcggtggcggaaacatgcaacaaatgatgaaacaaatgcaaaaaatgcaaaagaaaatggctcaagaacaagaaaaacttaaagaagagcgtattgtaggaacagctggcggtggcatggttgcagttactgtaactggtcataaagaagttgtcgacgttgaaatcaaagaagaagctgtagacccagatgatattgaaatgctacaagacttagtgttagcagctactaatgaagcgatgaataaagctgatgagcttactcaagaacgtttaggtaaacatactcaaggcttaaacatccctggaatgtgatcatagatgcattatccagaacctatatcaaagcttattgatagctttatgaaattgccaggcattggtccaaagacagcccaacgtctggcttttcataccttagatatgaaagaagacgatgttgttcagtttgccaaagcattagtagatgttaaaagagaattaacatattgtagcgtatgtggtcacattactgaaaatgatccatgttatatttgtgaagataagcaaagagatcgttcagttatttgtgttgtggaagatgacaaagatgtcatagctatggaaaaaatgagagaatacaaaggtttatatcacgttttacatgggtctatttcgcctatggatggaattggaccagaagatattaatattccttcattgattgaacgcttgaaaaacgatgaagttagcgaattaatcttagctatgaacccgaacttagagggggaatctacagccatgtatatttctagattagttaagcctataggtatcaaagtgacgagattagcacaagggttatctgtaggtggcgatttagagtatgctgacgaagtaacattatctaaagcaatcgcaggtagaacagaaatgtaatgtcttctattaaacattttagaatttaatactatagtaagaaaagtcacagtgtaatcattgtggctttttttatggtgtggtgtactactttatttgtggtgtgacggtggcatggtttacctagttttactgaggggtggggaatctttaggaagcaaaccattggttgtgatttgttatttctaatagtaatgaagtgaattggattatcgaagtagatctatggttatggtgtgttggtggcatggtttacctggttttactgagggatgggtaatcttaaagaagcaaatcgttggttgtgatttgttacttctaatagtaatgattcgaattgaatcatcgaagtaggaatactgttgtggtgtgttggtgctattaatttgataaatgcggttgatggttaatgactaggcaaatgaaattcttttgtaattgaaatgatagatgctggcttagtagttgcacttctttggtctaaagcttattaaatcagcctgtaaagcggtgttttgagagattatttaaaacttgtaaatttatttttaatttctggtaaaaaaataaagttctgttttgcggttttttcgattgatatatttagagaaaaacctgtttcttgttctaaaaaacgtactatctataagtgggggttttttaagttcgatttttagaatgagagcgttcagaatggatagtaaaggtgtaatttttactgttgttaagcagtttgaaagcctgtatagtatttatttgttgaggcaaacaaaacaactcaacttaagaaataacttgaattactaacgaaaattaattttaaaaagttgttgacttaaatgttaataaaatgtataattaattcttgtcggtaagaaaaatgaacattgaaaactgaatgacaatatgtcaacgttaattccaaaaaacgtaactataagttacaaacattatttagtatttatgagctaatcaaacatcataatttttatggagagtttgatcctggctcaggatgaacgctggcggcgtgcctaatacatgcaagtcgagcgaacggacgagaagcttgcttctctgatgttagcggcggacgggtgagtaacacgtggataacctacctataagactgggataacttcgggaaaccggagctaataccggataatattttgaaccgcatggttcaaaagtgaaagacggtcttgctgtcacttatagatggatccgcgctgcattagctagttggtaaggtaacggcttaccaaggcaacgatgcatagccgacctgagagggtgatcggccacactggaactgagacacggtccagactcctacgggaggcagcagtagggaatcttccgcaatgggcgaaagcctgacggagcaacgccgcgtgagtgatgaaggtcttcggatcgtaaaactctgttattagggaagaacatatgtgtaagtaactgtgcacatcttgacggtacctaatcagaaagccacggctaactacgtgccagcagccgcggtaatacgtaggtggcaagcgttatccggaattattgggcgtaaagcgcgcgtaggcggttttttaagtctgatgtgaaagcccacggctcaaccgtggagggtcattggaaactggaaaacttgagtgcagaagaggaaagtggaattccatgtgtagcggtgaaatgcgcagagatatggaggaacaccagtggcgaaggcgactttctggtctgtaactgacgctgatgtgcgaaagcgtggggatcaaacaggattagataccctggtagtccacgccgtaaacgatgagtgctaagtgttagggggtttccgccccttagtgctgcagctaacgcattaagcactccgcctggggagtacgaccgcaaggttgaaactcaaaggaattgacggggacccgcacaagcggtggagcatgtggtttaattcgaagcaacgcgaagaaccttaccaaatcttgacatcctttgacaactctagagatagagccttccccttcgggggacaaagtgacaggtggtgcatggttgtcgtcagctcgtgtcgtgagatgttgggttaagtcccgcaacgagcgcaacccttaagcttagttgccatcattaagttgggcactctaagttgactgccggtgacaaaccggaggaaggtggggatgacgtcaaatcatcatgccccttatgatttgggctacacacgtgctacaatggacaatacaaagggcagcgaaaccgcgaggtcaagcaaatcccataaagttgttctcagttcggattgtagtctgcaactcgactacatgaagctggaatcgctagtaatcgtagatcagcatgctacggtgaatacgttcccgggtcttgtacacaccgcccgtcacaccacgagagtttgtaacacccgaagccggtggagtaaccttttaggagctagccgtcgaaggtgggacaaatgattggggtgaagtcgtaacaaggtagccgtatcggaaggtgcggctggatcacctcctttctaaggatatattcggaacatcttcttcagaagatgcggaataacgtgacatattgtattcagttttgaatgtttatttaacattcaaatattttttggttaaagcgatattgcttgtgataataaagcagtatgcgagcgcttgacaatctattctttttaaagaaagcggttgtcagacaatgcgttaagaaaaattaaagcggagttcacttttgtaaatgagcatttgattttttgaaaacaaagcagtatgcgagcgcttgactaaaaagaaattgtacattgaaaactagataagtaagtaaaatatagattttaccaagcaaaaccgagtgaataaagagttttaaataagcttgaattcataagaaataatcgctagtgttcgaaagaacactcacaagattaataacgcgtttcctgtaggatggaaacatagattaagttattaagggcgcacggtggatgccttggcactagaagccgatgaaggacgttactaacgacgatatgctttggggagctgtaagtaagctttgatccagagatttccgaatggggaaacccagcatgagttatgtcatgttatcgatatgtgaatacatagcatatcagaaggcacacccggagaactgaaacatcttagtacccggaggaagagaaagaaaattcgattcccttagtagcggcgagcgaaacgggaagagcccaaaccaacaagcttgcttgttggggttgtaggacactctatacggagttacaaaggacgacattagacgaatcatctggaaagatgaatcaaagaaggtaataatcctgtagtcgaaaatgttgtctctcttgagtggatcctgagtacgacggagcacgtgaaattccgtcggaatctgggaggaccatctcctaaggctaaatactctctagtgaccgatagtgaaccagtaccgtgagggaaaggtgaaaagcaccccggaaggggagtgaaatagaacctgaaaccgtgtgcttacaagtagtcagagcccgttaatgggtgatggcgtgccttttgtagaatgaaccggcgagttacgatttgatgcaaggttaagcagtaaatgtggagccgtagcgaaagcgagtctgaatagggcgtttagtatttggtcgtagacccgaaaccaggtgatctacccttggtcaggttgaagttcaggtaacactgaatggaggaccgaaccgacttacgttgaaaagtgagcggatgaactgagggtagcggagaaattccaatcgaacctggagatagctggttctctccgaaatagctttagggctagcctcaagtgatgattattggaggtagagcactgtttggacgaggggcccctctcgggttaccgaattcagacaaactccgaatgccaattaatttaacttgggagtcagaacatgggtgataaggtccgtgttcgaaagggaaacagcccagaccaccagctaaggtcccaaaatatatgttaagtggaaaaggatgtggcgttgcccagacaactaggatgttggcttagaagcagccatcatttaaagagtgcgtaatagctcactagtcgagtgacactgcgccgaaaatgtaccggggctaaacatattaccgaagctgtggattgtcctttggacaatggtaggagagcgttctaagggcgttgaagcatgatcgtaaggacatgtggagcgcttagaagtgagaatgccggtgtgagtagcgaaagacgggtgagaatcccgtccaccgattgactaaggtttccagaggaaggctcgtccgctctgggttagtcgggtcctaagctgaggccgacaggcgtaggcgatggataacaggttgatattcctgtaccacctataatcgttttaatcgatggggggacgcagtaggataggcgaagcgtgcgattggattgcacgtctaagcagtaaggctgagtattaggcaaatccggtactcattaaggctgagctgtgatggggagaagacattgtgtcttcgagtcgttgatttcacactgccgagaaaagcctctagatagaaaataggtgcccgtaccgcaaaccgacacaggtagtcaagatgagaattctaaggtgagcgagcgaactctcgttaaggaactcggcaaaatgaccccgtaacttcgggagaaggggtgctctttagggttaacgcccagaagagccgcagtgaataggcccaagcgactgtttatcaaaaacacaggtctctgctaaaccgtaaggtgatgtataggggctgacgcctgcccggtgctggaaggttaagaggagtggttagcttctgcgaagctacgaatcgaagccccagtaaacggcggccgtaactataacggtcctaaggtagcgaaattccttgtcgggtaagttccgacccgcacgaaaggcgtaacgatttgggcactgtctcaacgagagactcggtgaaatcatagtacctgtgaagatgcaggttacccgcgacaggacggaaagaccccgtggagctttactgtagcctgatattgaaattcggcacagcttgtacaggataggtaggagcctttgaaacgtgagcgctagcttacgtggaggcgctggtgggatactaccctagctgtgttggctttctaacccgcaccacttatcgtggtgggagacagtgtcaggcgggcagtttgactggggcggtcgcctcctaaaaggtaacggaggcgctcaaaggttccctcagaatggttggaaatcattcatagagtgtaaaggcataagggagcttgactgcgagacctacaagtcgagcagggtcgaaagacggacttagtgatccggtggttccgcatggaagggccatcgctcaacggataaaagctaccccggggataacaggcttatctcccccaagagttcacatcgacggggaggtttggcacctcgatgtcggctcatcgcatcctggggctgtagtcggtcccaagggttgggctgttcgcccattaaagcggtacgcgagctgggttcagaacgtcgtgagacagttcggtccctatccgtcgtgggcgtaggaaatttgagaggagctgtccttagtacgagaggaccgggatggacatacctctggtgtaccagttgtcgtgccaacggcatagctgggtagctatgtgtggacgggataagtgctgaaagcatctaagcatgaagcccccctcaagatgagatttcccaacttcggttataagatccctcaaagatgatgaggttaataggttcgaggtggaagcatggtgacatgtggagctgacgaatactaatcgatcgaagacttaatcaaaataaatgttttgcgaagcaaaatcacttttacttactatctagttttgaatgtataatctacattcatatgtctggtgactatagcaaggaggtcacacctgttcccatgccgaacacagaagttaagctccttagcgtcgatggtagtcgaacttacgttccgctagagtagaacgttgccaggcaaaaaaaatggatgcgatgagccgcattgaactgcacccagtctagtagacaattaaataattaaaattaatggttggttttgttgttatacagaatcagccatttttaatgtaattctttcatgattaaagaaaagaataaaatcatgaattgtttttgtagcttcttctacactattaaatttaaagtgcttatttcctctaaaaatttcactttttattgtaccccatacaccttccattggaccgttatcgatacatttgctaacacgtgacatactttgaatcatgccacattcatccaacatatgtttaaatgttttcgatgtatattgaaaacctcggtcactatgaaataaaatacctttggtattttctactttttctatcgcttgattgaatgttttaaatactaattgattattgttagaagggcctagctcataactaacaatacgtttagcacctaagtcataaatggcactcaaatatatcttactaccttctttgattttaaattctgttacatctgttaaccaaactttatttggcgtatcaatgtcaaattgtcgattaagcttattttctgatgtgatttgtggcgttgaacgtcgataaggttttcgcttttgacgtattactgcttttaaattaagttctttcatcaaacgataaattcgctttcggtttacttgtttacctagttttaagcgaatatagatataaatgcgacgatagccataaataccattatacttatgatagattgattctatttctcgcttaagctgttcattctctaattcaagttcactcgattgataatgtacccacttataataactcgctctagaaatgcctaaaatacgacacaagcgttggatagggtattgatgttttaacgcttcgatcgttttgtatgccgtgatttgttttctctttgaatcatctctctttccaatgcttgaaacttttttaaaacgtcattttccatctctaataatcgattttgtgcttttaatgcttgaatttcagcttctttttgttcttctggcgtcatcatagatttgggttttcctttgcctctgccatctactaatccatttttaccatgtgcttgatacttatgaacccactggtaaatttgaccgtatgagatattaaagtgttctgcaacttctctataagattgtttatgattcaagtaatattcaacaattgttacacgttcttcaaatgtggtttttcttgctttcatgatatacaccccagttttaggagattgattcttaatctcttttcctacagtatacatttttatccaatttttgacttgtgtcgaactacgaatattgtatttgattgcgatgtcttgggttgattgatttgaattcaaatattcatttacaacttttaattttagttcctttgaatagtgattgtattgtttttgtgtaagtagtgtttcaataccatgggttttataatatttatacttaggatacaaagtattgacattaatatctaattgtaatgtatcgattaagtattgaaacgacacgcctttttcatattcttgaaacatatatagcagtacatctatgtctactttaggttttattgacataaataaagctcccttcaaagttttcattttttcaatgtctactttgaagggagcatttcacattgagaccgcaaggtctcttttttttatgtctaaaacgtcaaaataaaagttaacacaaagaaaaatggcttggcgaagtgaaaacgtttgaatctgacgaaacaaaaaaagagcgtaacgagtttagtagagctaaatgagtaagcgagagcgaaggagaggaaagaagcaagcgattgtcacaagtcaagaaaggttcttagcgacgatggtagccaacttacgttccgctagagtagaacgttgccaggcaaaaaaaatggatgcgatgagccgcattgagttttggaaatgataatttaataatgtgcattttcgattgtctaaatctgtaactagaagtataagtgaagacattcagaagtattatagaaagtgaacagcagtaagatagtttttaatcataaatcatcttactgctgtttttaggttttatgtttaatatcttttaaatcgaaatacaaaaaggaaattaattattatacaatagacaagctattgcataagtaacactaacttttgtcaaagaagtgttactttataattaatgattttattagagcgtctacatgcggttttaaagcatcatcgtctataccgccaaagcctaatataaatttaggggttttcttatagtcttggtcatcatcaaaattataaacttgtaattttaactttactttatttgctctatcaagacactcttgtaatgttaatccattttttactgtaattgtaaaatgcatacctgtttcagcaccttgaatatcaagttgctctttgtatggttttaatctttttaaaatataggttagttttctacgataaattcgtctcattttatttaaatgcctttcaaaaccaccggaagatataaacgttgcaataaggttttgcatatgaacaggtacagtgttgccttcaatgtgattttgagaatgatattttttcattatagaatagggtaacaccatatatgcaacacgacagctaggaaaaatagactttgaaaatgtactgatataaatcactttttctcctcttgaatatagaccttgaattgctggaataggtttaccgaaatatctaaactcggaatcataatcatcttctataataaatcgttcttctttttcttgagcccattgtattaattgagttcgtttttttaaatccattacatatccagttggaaattgatgggaaggcgttatatatactatatttttttgtgatttaataacttcatctacgtttattccattatcttcaacttcaatttgttcatattcaacttgttttttatctaaaatatttttgattggtggataactaggtttttcgataataaacgttgaagtataaagtaaatcgactaattgatttactaattgttcggtagatgaaccaattataatttgattaggatcacaaattacaccacgattagtaaataaataaaatgccagttgaaaccgcaaatgtaattctccttgaaagtgtcctctacgtaattgatttaaatgatttgtatcataaagatctttggaatactttctgaaaagttctatagggaaatgtttcgtatctatttcatccaaattaaaagcataatcataagcttcatcactcgcttttggtttatatgaatcatcatcaaaaagagaagggataggttgattgtttaaaattgttaaagattcaattttggacacaaaatatccagagcgaggtcttgaataaatgtaaccttcatctaatagaagttgatatgcatgttctacggttgtttggctgatagataaatgtttgcttaattgtcttttagaataaaatttatcaccttctttaaattgaccttcaattatttgtttttttaatttttcataaagttgatggtataaagtgtttttcaattttataactgacctcctaaatttgtcttattttgtacctttttaaatatcagtttatacattacaatgtatttaatcaacttgaaaaggggttttatgtataatgagtaaaattattggatcagacagagtcaaaagaggtatggctgaaatgcaaaaaggcggcgttattatggatgtcgttaatgctgagcaagcaagaattgcagaagaagctggcgcggtagcagttatggcattagaacgagtaccttctgatattagagctgctggtggcgttgcacgtatggcaaaccctaaaattgtagaagaagtaatgaatgctgtttctattccagtcatggctaaagcacgtattggtcatatcactgaagcaagagtattagaggcgatgggtgttgactatattgatgaatcagaagtgttaacaccagcagatgaggaatatcacttaagaaaagatcaatttacagtaccatttgtatgtggatgtcgtaatttaggtgaagctgcgcgtagaattggtgaaggtgctgctatgttacgtactaaaggtgaaccaggtacaggtaatattgttgaagctgtaagacatatgagacaagttaattcagaagttagtcgattgactgtaatgaatgatgatgagattatgactttcgcgaaagatatcggtgcgccttatgaaattttaaaacaaattaaagacaatggtcgtttaccggtagttaactttgcagctggtggcgttgcgactcctcaagatgctgctttaatgatggaattaggtgccgatggtgtattcgttggatcaggtatttttaaatcagaagatccagaaaaatttgctaaagcaattgttcaagcaacaacacattaccaagactatgaactaattggaagattagcaagtgaacttggcactgctatgaaaggtttagatatcaatcaattatcattagaagaacgtatgcaagagcgtggttggtaagatatgaaaataggtgtattagcattacaaggtgcagtacgtgaacatattagacatattgaattaagtggtcatgaaggtattgcagttaaaaaagttgaacaattagaagaaatcgagggcttaatattacctggtggcgagtctacaacgttacgtcgattaatgaatttatatggatttaaagaggctttacaaaattcaactttacctatgtttggtacatgcgcaggattaatagttctagcgcaagatatagttggtgaagaaggataccttaacaagttgaatattactgtacaacgaaactcattcggtagacaagttgacagctttgaaacagaattagatattaaaggtatcgctacagatattgaaggtgtctttataagagcgccacatattgaaaaagtaggtcaaggcgtagatatcctatgtaaggttaatgagaaaattgtagctgtccagcaaggtaaatatttaggcgtatcattccatcctgaattaacagatgactatagagtaactgattactttattaatcatattgtaaaaaaagcatagcttaatgtatgctaaatcaacgaattattgatatttatagatttgttgagaagaaaattactccttcaaacttagctttggaggagttattttttatgtcaaaattaaaaatgataaaagataaagatatacataagaaaaaacccttcaaagagactgagaatagtcaaaattttgaaggggttaattcgatgttgatgtatttgttaaataaagaatccagcgattgcagctgaaatgaaagatactagtgttgcaccgaataataatttcaaaccaaagcgggcaactgtatctccttttttgtcattaagtgatttaatcgcacctgaaataataccaatagagctaaagttagcaaatgatactaagaatacagatgtaacaccttttgcgtgttcagataaatcactaagtttaccaagtgcttgcattgctacaaattcgttagataatagttttgttgccataactgaaccggcttgaactgcatcttgccatggcacacctactaagaatgcaaatggtgcaaagacaaaaccaattaatgtttggaaatcccaagaaatagcgccacctgaaactgtactaaagatattgcttacaattccatttaatagagcgataatggcaatgtaaccgattagcattgcgcctacaatgacagctactttaaatccatctaaaatatattctcctagcatttcaaagaatgattgttgtctttcttcagtttcttcaactaataatttgtcatcttcttcattaactttataagggttaataattgaagcgatgataaaaccaccaaataagtttaagacaacagccgttacaacatatttaggttcaattaaggtaaagtatgcaccgataattgaagcagaaacagtcgacattgctgaagctgttaatgtgtataaacgttgcttaggtatgtatggtaattgttttttaattgaaataaatacttcagattgtcccaaaattgctgcagcaactgcattgtatgattctaaacgtcccataccattaattttagaaattaagaatcctaaaacattaatgattaaaggtaaaatctttgtgtattgaaggataccgataatcgctgaaataaatacgataggtaataatacactgaagaagaatggtggttgcttaggatcgatatattgaataccaccgaatacaaagttaacaccatctgcagcttttaataataagtagttaaaaccgttcgaaataccaccaataaccttgattcccattgtagttttaagcaagataaatgcaaagataagctgaattgcaagtaaaattcctacatatttccagcgaatatttttcctgtctgagctaaatagaaacgcaagtgctaaaaagaagataattccgataatcccaattagaatatgcatatatttctcattcctttagttttttctacaatctatcatacaataaaatggaagggctaacatcataaatttttgaaaatataaaaacaaattaattgaaaaaggtcaaaataggtcatataatatagtcaaagaaggtcaaaaaggggtgatatacatgcacaatatgtctgacatcatagaacaatacatcaaacgtttatttgaagagtcgaatgaggatgtcgttgaaattcagagagcgaatatcgcacagcgttttgattgcgtaccatcacagttaaactatgtaatcaaaacacgattcactaatgaacatggttatgaaatcgaaagtaaacgtggtggtggtggttacatccgaatcactaaaattgaaaataaagatgcaacaggttatattaatcatttgcttcagctgattggaccttctatttctcaacaacaagcttattatattattgatgggcttttagataaaatgttaataaatgaacgtgaagctaaaatgattcaagcagttattgatagagaaacgctatcaatggatatggtttctagagatattattagagcaaatattttaaaacgtttgttaccagttataaattattactaaatgaaatgaggtgttgaagtgctttgtgaaaattgtcaacttaatgaagcggaattaaaagttaaagttacaagtaaaaataaaacagaagaaaaaatggtgtgtcaaacttgtgctgaggggcaccatccgtggaatcaagctaatgaacaacctgaatatcaagaacatcaagataatttcgaagaagcatttgttgttaagcaaattttacaacatttagctacgaaacatggcatcaattttcaagaagtagcgtttaaagaagaaaaacgttgcccatcatgtcacatgactttgaaagatattgcacatgttggtaaatttgggtgtgctaattgttatgcaacatttaaagatgacatcattgatatcgtccgcagagttcaaggtggacaatttgagcacgttggaaagacaccacattcttcacataaaaagatagctttaaagcgaaaaatcgaagaaaagaatgaatatttgaaaaaacttgttgaaatccaagattttgaggaagcagccattgttagagatgaaattaaagcactaaaagctgagagtgaggtgcaacatgatgacgcataatattcatgataatatcagccaatggatgaaaagtaatgaagaaacaccaattgttatgtcttctagaattcggttagcgcgtaatttagaaaatcatgtgcatccactaatgtatgctactgaaaatgatggatttagagttataaatgaggtacaagatgccttgccaaattttgaattaatgcgtcttgatcaaatggatcaacaaagtaaaatgaaaatggttgcaaagcatttgattagccctgaactaataaaacaaccagcagccgcagtattagtgaatgatgatgaatctttaagtgtcatgataaatgaagaggaccatattcgtattcaagctatgggaactgacacgacattacaggctttatataatcaagcttcatcaattgatgatgaattagatcgaagccttgatataagttatgatgaacaacttggttatttaactacatgtcctaccaatataggtactggtatgagagcaagcgtgatgctacatttaccaggtctatctattatgaaaagaatgacacggattgctcaaaccattaatcgttttggatatacaatcagaggtatttacggtgaaggttcgcaagtttatggacatacttatcaagtatccaaccaacttacacttggtaaatctgagttagaaatcatagaaacattaacagaagttgttaatcaaatcattcatgaagaaaaacaaatacgacaaaagttagacacttataatcaactagaaacacaagaccgtgtttttcgctcgctaggtattttacaaaactgtagaatgataactatggaagaggcttcttatagattaagcgaagttaaacttggtatagatttaaattacattgaattacaaaactttaaatttaatgaattgatggtagctatacagtcaccatttttattagatgaagaagatgacaaatctgtaaaagaaaaacgagcagatatactaagagaacatataaagtaggaggtcattatttatgttatttggtagattaactgaacgtgcacagcgcgtattagcacatgcacaagaagaagcaattcgtttaaatcattcaaatataggaacagaacacctattattgggggtaatgaaagaacctgaaggaattgctgcaaaagtattagaaagttttaatatcactgaagataaagtaattgaagaagttgaaaaattaatcggacatggtcaagatcatgttggtacattgcattatacacctagagctaaaaaagtcattgaattatcgatggatgaagctagaaaattacatcacaattttgttggaacggaacatattttattaggcttgattcgtgagaatgaaggtgttgcagcaagagtttttgcaaatctagatttaaatattactaaagcacgtgcacaagttgtgaaagctttaggaaaccctgaaatgagtaataaaaatgcacaagctagtaagtcaaataatactccaactttagatagtttagctcgtgacttaacagtcattgccaaagacggtacattagatcctgttataggacgtgataaagaaattacacgtgtaattgaagtattaagtagacgtacgaaaaacaatcctgtgcttattggagagccaggtgttggtaaaactgctattgctgaaggtttagcgcaagccatagtgaataatgaggtaccagagacattaaaagataagcgtgttatgtctttagatatgggaacagtagttgcaggtactaaatatcgtggtgaatttgaagagcgtctgaaaaaggttatggaagaaatccaacaagcaggtaatgtcatcctatttattgatgaattgcatactttagttggtgctggtggtgctgaaggtgctatcgatgcttcgaatattttgaaaccggcattagcacgtggtgaattacaatgtattggtgctactacattagatgaatatcgcaaaaatattgaaaaagacgcggctttagaacgtcgtttccaacctgtacaagttgatgaaccttcagtagtagatacagttgctattttaaaaggattaagagatcgttacgaagcacaccatcgtattaatatttcagacgaagctattgaagcagctgttaaattaagtaacagatatgtttcagatcgtttcttaccagataaagcaattgatttaattgatgaagcaagttctaaagtaagacttaagagtcatacgacacctaataatttaaaagaaattgaacaagaaattgaaaaagttaaaaatgaaaaagatgccgcagtacatgctcaagagtttgaaaatgctgctaatctgcgtgataaacaaacaaaacttgaaaagcaatatgaagaagctaaaaatgaatggaagaacgcacaaaatggcatgtcaacttcattgtcagaagaagatattgctgaagtcattgcaggatggacaggtatcccattaactaaaatcaacgaaacagaatctgaaaaacttcttagtctagaagatacattacatgagagagttattgggcaaaaagatgctgttaattcaatcagtaaagcggttagacgtgcccgtgcagggttaaaagatcctaaacgaccaattggtagctttatcttccttggaccaactggtgttggtaaaactgaattagctagagctttagctgaatcaatgtttggcgatgatgatgcgatgatccgtgtagacatgagtgaatttatggaaaaacacgcagtgagccgattagttggtgctcctccaggatatgttggtcatgatgatggtggacaattaactgaaaaagttagacgtaaaccatattctgtaattttatttgatgaaattgaaaaagcacatccagatgtatttaatattctattacaagttttagatgacggacatttgacagatacaaaaggacgtacagttgatttcagaaatacaattatcataatgacatcaaacgttggagcacaagaattacaagatcaacgatttgctggattcggtggttcaagtgatggacaagattatgaaacaattcgaaaaacgatgttaaaagaattaaaaaattcattccgtccagaatttttaaaccgtgtagatgatatcattgtattccataaactaacaaaagaagaattaaaagaaattgtaactatgatggttaataaattaacaaatcgattatccgaacaaaacataaatattattgttactgataaagcgaaagataaaatcgcagaagaaggatatgatccagaatatggtgcaagaccattaattagagcgatacaaaaaactatcgaagataatttaagtgaattaatattagatggtaatcaaattgaaggtaagaaagttacagtagatcatgatggtaaagagtttaaatatgacattgctgaacaaacttcagaaactaaaacaccatcgcaagcataattataaaacagtccaaaacaaattaaagttttgggctgttttttagtagcattgaactatagaaattcgtgaaagtatccaccaacgaaacaacctaataaaataatcatcaaaggatagttaagaattatatgaaacaagttaatgagcatacagcgatagtaaaaaggtatgaatttttataaaggttttttgtttgaagatactagcaacttacgtcaaaataaaataggtctatataatattgtgataaatctagagaaaagagtttactaagaaattattaagattttatctttgaaagatacctactatcaacatgatgtaagtttattttataatattcataaaaaataaatatgataaaacagtttgcgttagtagtcatgttaaaatacaaacaaatgtaactcacatttaatttgtcataatgggaatgtgcgtttaaaatagatttgttcaaaggaaagtggaggtgcaattttggccaagaaaaaagtgatttttgaatgtatggcttgtggttatcaatctcctaaatggatggggaaatgtcctaattgtggcgcttggaatcaaatggaggaaattgttgaaaaagcagccaatcctaaacatggagtgaaaaccaaggaattagtaggtaaagtacaaaaattaaatagtattaaacatgaaacaacgccgagagtgttaacagattcagcagaatttaaccgtgtattaggtggaggtattgtgagcggatcgttagtacttattggtggggatccaggtattggtaagtcaacgttacttttacaaatttgtgcatcgttatctcaaaagaaaaaagtactatatattactggagaagaatcgcttagtcagactaaattacgtgcagagcgattagatgaagattcaagtgaattgcaagtattagctgaaacagatcttgaagttatttatcaaacagtaaaagaggaacaacctgatttactagtagtggattcgattcaaacaatatatcatcctgaaatcagctctgcgccaggttctgtttcacaagttcgtgaaagtacacaaagtttaatgaatattgctaaacaaatgaacattgcaacttttatagtgggtcatgtaacgaaagaaggtcaaattgctggcccaagattgctagaacacatggttgatactgtactttattttgaaggcgatgaacaccacgcatatcgaattttgcgagctgttaaaaaccgttttggttcaacgaatgaaatgggaatcttcgaaatgaagcaaagtggattaaaaggtgtaaataatccatctgaaatgtttttagaagaacgttcaacaaatgttccaggttcaacaattgttgcaaccatggagggaactagaccacttttaatagaagttcaagcgctggtaactccaacgacttttaacaatccgagacgaatggcaacagggattgatcacaatcgattaagtttgttgatggctgttttggaaaagaaagaaaattatctattacaacaacaagatgcttatatcaaagtagctggcggtgtaaagttaacggagccagcagttgatttaagtgtaattgtagcaactgcgtctagctttaaagataaagctgtcgacggattagattgctatattggagaagttggtttaacaggtgaggtacgtcgtgtatctcggatagaacaacgcgtgcaagaggctgcaaaactaggtttcaaacgtgtaattattcctaaaaataatataggcggatggacatatcctgaaggtatacaagtaataggtgtaactactgtacatgaagcattgtcgtttgctcttcattcataaaacatcaagaaaggaggacattgtgtgaatatcgttaaactaatggttattattatttacttaattattgggagcgcattaggaataattattattcctgaaattgcaaatgatcttggattacaaaactccagctttttaaaaaatcactatgtagatggcattatcggtagtatttttatgttcttaatttttggtgtatttattagacgagttactaacgctataaaaggtttagaacattttattatgcgtagaagtgctgttgaaatactattcgcaacaataggtttaataatcggattacttatttctgttatggtgtcgtttatattggaatcaattggcaactctatttttaatcatttcattcctgtcataattacgatattactatgttatttcggtttccaatttggccttaaaaaacgagatgaaatgttaatgtttttacctgagaatatagcgcgttccatgtcacaacatactaaaagtgctacaccaaaaattatcgacacaagcgcaattattgatggtcgtattttagaagtcattcgttgcggttttatcgatggcaatattttaattccacaaggtgttattaatgaattacaaattgttgcagattcaaatgacagtgttaaacgtgaaaagggtaaaagaggcttagatatcttaaatgaattgtatgatttagactatcctacaaaggttatacatccaactaaaacacatagtgatattgatacaatgctattaaaactagcaaaacaatatcatgcaagtattattacaacagatttcaacctaaataaagtatgtcatgtacatggtatcaaagcattaaatgttaatgatttatcagaagcaatcaaacctaatgtacatcaaggtgatcaacttcatattttactgacaaaaatgggtaaagagcctggtcaagcagtaggatatctagatgatggtacgatggtagttgttgataatgctaaaaatcttattggcagtcatgtcaatttagaagtagtgagcttattgcaaacatcttcaggaagaattgtttttgctaaaaaaatcgaagatacagtatcattataaaaactgtagttgacggaaacaaaatagatattaaaaggtatatgaaatggcgaagtttgtaatttgaagtataactataaataaatacaaaacatatcagttatcaaaaaatacaaatagtgctaacatatcattgaaacaagttcattaagtgttaaattttagatattaataaagttattcttatagcaatcaagacatacaaaattagaatcaattttaacgtatttgaatagttaatttgaagtttaattttacagtacataatattcatttttaagtcgttgaaatgcgtatgtagtgcagtcttgattcttagggatagcttttttaaagtgttgaaaaaacaactgctttctatttaaaatttaagcatattacccagggaattatgttatgattaaacaatgaaattattttaaggtcatgttaaaaagcattgtttcgttttaacaataagacgagttacacatttgttatgacggtcgaagatagcaaatgaacaatttatatgaactaacttgaaaatctgatatttaatttaggagtgaaaaaaatgagcgatcgtataagagtaagatatgcaccaagtccaactggttatcttcatattggtaatgcaagaacagcattattcaattacttgtatgctaaacattacaacggagattttgtgattcgaattgaagatactgataaaaaacgtaatttagaagatggagaaacatcacaatttgataatcttaaatggttaggattagattgggatgagtctgtagataaagacaatggctacggaccatatcgtcaatctgaacgtcaacatatctaccaaccattaatagatcagttactagcagaagataaagcatataaatgctatatgacagaagaagaattagaagctgaacgtgaagcgcaaatcgctcgtggtgaaatgcctcgctatggtggtcaacatgcgcatttgactgaagaacaacgtcaacaatttgaagcagaaggacgccaaccatcaattcgtttccgagtacctcaaaatcaaacgtattcatttgatgatatggttaaagggaatatttcatttgattcaaatggtattggtgactgggttatcgttaaaaaagatggcattccaacgtacaattttgcagtagctatagatgatcattacatggaaatttcagatgtcattcgtggtgatgatcatatttcaaacacgcctaaacaaattatgatttatgaagcatttggctgggagccacctcgttttggtcatatgtcattaattgttaatgaagaacgtaaaaagttaagtaaacgtgatgggcaaattttacaatttattgagcaatatcgtgacttaggttatttacctgaagcgttatttaattttattgcgttattaggttggtctcctgaaggtgaagaagaaatcttttctaaagaagaatttatcaaaatctttgatgaaaagcgtttatcaaaatcaccagcatttttcgataagcaaaaattagcatgggttaataaccaatatatgaaacaaaaagatactgaaacagtattccaattagcattacctcatttaattaaagcgaatttgattcctgaggtgccgtcagaagaggatttatcttggggacgcaaattaattgcgctttatcaaaaagaaatgagttatgccggtgaaattgtacctttatcagaaatgttctttaaagaaatgccagctcttggtgaggaagaacaacaagtgatcaatggagagcaagtaccagagttaatgacgcacttattcagtaaattagaagcacttgaaccatttgaagcggctgaaattaaaaagacaattaaagaagttcaaaaagaaacaggaataaaaggcaagcaattatttatgcctattcgtgttgctgtaacaggccaaatgcatggtcctgaattaccaaatacaattgaagtacttggtaaagaaaaagtgctaaaccgtttaaaacaatataagtaatgaaatagacaagatcaaggtagtatatacttgaattttataacgtaaccacatatgataaagttgtattaacaaattacaacaatatgaatagagtactttatataaaacgaaggattagtaattaaatttatacgatgcagagagtgtacggttgctgtgagtacaacgtagaaattaatgaatgcaccttcgtaaaatgaattaaatatataatgagagtgatgagcattaagttgacttagtttccttgataatttggaagcgcccgcaattttattaatgtaattcgctaaattcagagtggaaccgtgcggaagcgcctctaacaatacaatttgtatgttagtggtgctttttttgatatttaatttcgcaggtacttcaattatgtatttacgtagttcaatcattgaggaggaaatgatcttgttaaaaagaatgagagacgatataaaaatggtatttgagcaggatccagcggcacgttcaacattagaagtcattacaacgtatgcaggtttacatgcagtttggagtcatttgattgcacataagttatacaaccaaaaaaaatatgttgcagcacgcgcgatatctcaaatttcaagatttttcacaggtatagaaatccatccaggtgctaaaattggaaagcgtctatttatagatcatggtatgggcgttgtaataggagaaacatgtacaattggtgataatgtgacaatctatcaaggcgtgacacttggtgggacagggaaagaaagagggaaaagacacccagatataggagacaatgttttaatagcagcgggtgcgaaagttttaggaaatattaaaataaattcaaatgtaaatattggtgcaaattcagttgttttacaatcagttccaagttattcaacggttgttggtataccaggacatattgttaagcaagatggtgttcgagttggaaaaacatttgatcatcgccatctacctgatccaatttatgaacaaattaagcatttagaacgacaacttgaaaagactaggaatggagagattcaagatgattacattatataatacgcttacacgtcaaaaagaagtgttcaagccaatagaaccaggaaaggtaaaaatgtatgtatgtggtcctacggtatataactacattcatattggtaatgcaagaccagcaattaattatgacgtagtgagacgttactttgaataccaaggatataatgtagaatatgtatcaaattttacagatgtagatgataaattaattaaacgttctcaagaattaaatcagactgttcccgaaattgcagaaaaatatatcgctgcttttcatgaagatgttggtgctttaaatgttagaaaagcgacttcaaatccaagggtaatggaccatatggatgacattattcaatttattaaagatttggttgatcaaggttatgcatatgaaagtggtggcgatgtttactttagaacacgtaaatttgaaggttatggtaaattaagtcatcaatccatagatgacttaaaagtgggtgctcgtatagatgcaggagagcataaggaagacgcacttgattttacattgtggaaaaaagcgaagcctggcgagattagttgggatagcccatttggtgaagggagaccaggatggcatattgaatgttctgtaatggcatttcatgagctaggagctacaattgatatacatgcgggtggttcagatttacaatttccacatcatgaaaatgaaatagcacaatcggaagcacataatcatgcgccattcgctaattattggatgcataatggttttattaatattgataatgaaaaaatgagtaaatcactaggcaactttattttagttcacgatattattaaagaagttgatccagatgtattaagattctttatgattagcgtacattatagaagtccaattaactataatctagaattggttgaatcagcacgtagtggactagagcgtattcgcaatagttatcaattaattgaagagcgcgcacaaattgctactaatattgaaaatcaacagacatatattgatcaaattgatgcgattttaaatcgttttgaaacagttatgaatgatgattttaatacagctaatgcaattacagcttggtatgatttagcaaaacttgcaaataaatatgtactagagaacacaacatcaacagaagtaattgataaatttaaagcagtttatcaaattttcagcgatgttttaggtgtaccgttaaaatctaaaaaagcagatgaattattagatgaagatgttgaaaaattaatcgaagagcgtaatgaagcaaggaaaaacaaagattttgcacgagcagatgagattcgagacatgctgaaatcacaaaacattatattagaagacacacctcaaggggttagatttaaacgtggataatcaacaagataatcacattaaattattgaatccattgaccttagcatatatgggagacgcagtcttagatcaatatgtacgtacgtatatcgttttaaagcttaaaagtaagcctaataaactacatcaaatgtctaaaaaatatgtatctgccaaaagtcaggcgcaaacgttagaatatttaatggagcaagaatggtttacagacgaagaaatggatattttgaaacgagggcgtaacgcgaaaagtcatactaaagctaaaaatactgatgttcaaacatatcgtaaaagttcagcgatagaagcagtgataggttttctttatttagaaaaaagagaagaacgattagaggcattattaaatgaaataataacaatagtaaacgaaaggtagtgacaatgtggaagatacggttattgttggtaggcatgctgttagagaagcgattattactgggcatccgataaataagatattgattcaagaaggaattaaaaagcaacaaattaatgaaattttaaaaaatgcaaaagatcaaaaaatcattgttcaaactgtaccaaaatctaaattagattttttagcaaatgcaccacatcagggggttgcagcgcttattgcaccatatgaatatgctgacttcgatcaatttttaaaacagcaaaaagaaaaagaaggtttatcgacagtgcttatattagacggcttagaagacccgcataacttgggatcaattttaagaacagcagatgcaacgggagttgatggtgttattattcctaaacgtcgttcagttacactaacgcaaacagttgcaaaagcctcaacaggtgcaattgaacatgtaccagttattcgagtgacaaatttagctaaaactatcgatgaactaaaagataatggtttttgggtagctggcactgaagctaataatgcaacagattatagaaatcttgaagcggacatgtcattggctattgtaattggcagcgaaggacagggtatgagtcgtctagtaagtgataaatgcgatttttatattaagattccaatggttggccatgtaaacagtttgaatgcttcggttgcagcaagtttaatgatgtacgaagtatttcgaaaaagacatgatgttggagaaatataatgaaagaacgttacttaatcattgatggatacaatatgataggacaatcaccaacgctaagcgccattgcaaaagagaatttagaagaagctagaatgcaattaatagatacaattgcaaattataatgcagttatttcagatgaaattatttgtgttttcgatgcttatgaccaatcgggtgttgaaagagaatacatgtatcatggcgttaaaacaatttttaccaaggaaaaagaaacagctgatagtttcatagaacgttatgtctatgaactttatgacaagcacactaagcatattacagttgtaacaagtgatatgagtgagcaacatgctatctttggatcaggtgcatatagaatatcatctcgcgaaatgtggagagatttaaaagaaaatgaaattgatgtgagtaaatcattagatgatataagtgaaaacaagccaagaactcgaattccgttatcttctgaaatccttgcagaatttgaaaaaatacgaagaggacatcataagaaatgacatttccatcatcttgaaattttgaatgtaacaatattaaactaaccttaaattttagatagaaggggttagtttaatacttgaaatatgatttgacaactcaagacagtacaatcaaacgtaacaatgcaataaatgataaagacttcgaaaagttagtaatggatctacaaccattaattatacggcgcatcaaaacatttggatttaatcattatgatttagaagatttatatcaagaaatacttatacggatgtataggtcggtccaaacatttgattttagtgcagagcagcctttcacaaattatgttcaatgtttaattacgtctgtaaagtatgattatttgagaaaatatttagctacaaataaaagaatggataatttgattaatgaatatagagttacgtatccatgtgcaataaagcgttatgatgttgaaaacaattatttgaataaattagcaattaaagagttgattcgtcagtttaagtatttgagtgcatttgaaaaagatgtcatgtatttaatgtgtgaacaatataagccgagagacaactgatgcatgtaaaagagaaagtgatttataatgccatacaacgatgtaaaaataaaataaaacgttatttcaaaatgatttgaaaagcgtcttaggacgtgaattgaattagaacgtgttacttcctgatggtttgacatttgttataaattttatgtatagtatactggtattataatgaataaaggtgaattattgtgaggaaaatacctttaaattgtgaagcttgtggcaatagaaattataatgttcctaagcaagaaggcacggcaacaagattaaccttaaagaaatattgtccaaaatgtaacgcgcacacaattcataaagaatcgaaataaatacattcgaaataatactttgataatatgttcaaaggatttggaggttgagcagatggctaaaaaagaaagtttctttaaaggcgttaagtctgaaatggaaaaaacaagttggccgacgaaagaagagctatttaaatatactgtaattgtagtttctactgttatattcttcttagtctttttctatgccttagatttaggaattacagcattgaaaaatttattatttggttagaggagtgaagacatgtctgaagaagttggcgcaaagcgttggtatgcagtgcatacatattctggatatgaaaataaagttaaaaagaatttagaaaaaagagtagaatctatgaatatgactgaacaaatctttagagtagtcataccggaagaagaagaaactcaagtaaaagatggcaaagctaaaacgactgttaaaaaaacattccctggatatgttttagtggaattaatcatgacagatgaatcatggtatgtggtaagaaatacaccaggcgttactggttttgtaggttctgcaggtgcagggtctaagccaaatccattgttaccagaagaagttcgcttcatcttaaaacaaatgggtcttaaagaaaagactatcgatgttgaactcgaagttggcgagcaagttcgtattaaatcaggtccatttgcgaatcaagttggtgaagttcaagaaattgaaacagataagtttaaactaacagtattagtagatatgtttggccgagaaacaccagtagaagttgaattcgatcaaatagaaaagctttaattaacaattaaagttattaaactaaccaaaagataaaaaagagtattgattttttaattagaaaagtgttaaaattatgtggtcgcgcttttagagcgcccatttcgtcacgaaatgttaagagtgggagggcaaaactgagccctgtgaccacatcacgatatcaaggaggtgcacatcgtggctaaaaaagtagataaagttgttaaattacaaattcctgcaggtaaagcgaatccagcaccaccagttggtccagcattaggtcaagcaggtgtgaacatcatgggattctgtaaagagttcaatgcacgtactcaagatcaagcaggtttaattattccggtagaaatcagtgtttatgaagatcgttcatttacatttattacaaaaactccaccggctccagtattacttaaaaaagcagctggtattgaaaaaggttcaggtgaaccaaacaaaactaaagttgctacagtaactaaagatcaagtacgcgaaattgctaacagcaaaatgcaagacttaaacgctgctgacgaagaagcagctatgcgtattatcgaaggtactgcacgtagtatgggtatcgttgtagaataattttacgaatattaaatttgattacatgatttaaacgatgaagcagataacagagataataatgatgaattataaatataatctgaatgactagattaatgattgatttattcatatgattaattcttctgttgtctgctcttaacttgcatctagcaagtaatgtgggaggaaattccgctaaaaccactaaaggaggaactataaatggctaaaaaaggtaaaaagtatcaagaagcagctagtaaagttgaccgtactcagcactacagtgttgaagaagcaattaaattagctaaagaaacaagcattgctaactttgacgcttctgttgaagttgcattccgtttaggaattgatacacgtaaaaatgaccaacaaattcgtggtgcagttgtattaccaaacggaactggtaaatcacaaagtgtattagtattcgctaaaggtgacaaaattgctgaagctgaagcagcaggtgctgactatgtaggtgaagcagaatacgttcaaaaaatccaacaaggttggttcgacttcgatgtagtagttgctacaccagacatgatgggtgaagttggtaaattaggtcgtgtattaggaccaaaaggtttaatgccaaaccctaaaactggaactgtaacaatggatgttaaaaaagctgttgaagaaatcaaagctggtaaagtagaataccgtgctgaaaaagctggtatcgtacatgcatcaattggtaaagtttcatttactgatgaacaattaattgaaaacttcaatactttacaagatgtattagctaaagctaaaccatcatctgctaaaggtacatacttcaaatctgttgctgtaactacaacaatgggtcctggagttaaaattgatactgcaagtttcaaataataaatgatataaacaattacaggctgaaagaaatatctttcagtctgtaaaaatatattgacaataagtaatttccaagttatattacttattgtgattattttacctaagacagtaggagttatttataacttaaaatttatcctgccgaggctaaaattgacttgaacgtgatgatctatgatctttcaagcactttttgccgtgggtagaaagtgctttttttattaattttaaaaaaagcaccaaaaatttaaatggaggtgtctgaatgtctgctatcattgaagctaaaaaacaactagttgatgaaattgctgaggtactatcaaattcagtttcaacagtaatcgttgactaccgtggattaacagtagctgaagttactgacttacgttcacaattacgtgaagctggtgttgagtataaagtatacaaaaacactatggtacgtcgtgcagctgaaaaagctggtatcgaaggcttagatgaattcttaacaggtcctactgctattgcaacttcaagtgaagatgctgtagctgcagcgaaagtaatttctggatttgctaaagatcatgaagcattagaaattaaatcaggcgttatggaaggcaatgttattacagcagaagaagttaaaactgttggttcattaccttcacacgatggtcttgtatctatgcttttatcagtattacaagctcctgtacgcaacttcgcttatgcggttaaagctattggagaacaaaaagaagaaaacgctgaataatttttagcgtaaaaaaattaaaaataatggaggaattataaaatggctaatcatgaacaaatcattgaaacgattaaagaaatgtcagtattagaattaaacgacttagtaaaagcaattgaagaagaatttggtgtaactgcagctgctccagtagcagtagcaggtgcagctggtggcgctgacgctgcagcagaaaaaactgaatttgacgttgagttaacttcagctggttcatctaaaatcaaagttgttaaagctgttaaagaagcaactggtttaggattaaaagatgctaaagaattagtagacggagctcctaaagtaatcaaagaagctttacctaaagaagaagctgaaaaacttaaagaacaattagaagaagttggagctactgtagaattaaaataattcaagtatcttaaacttaataatcaaagttttatagcaagtattgctataatataatgattctttgagaagttaaaaccccgttattttgataacggggttttattcatttaaagactaagtgaaatgttataattataatgacgagttacaaagtgaagatgaggtggaataatgagtcattattacgatgaagatccaagtgtaattagcaatgaacaacgtattcaatatcaattaaaccatcataaaattgatttaataactgataacggagtgttttcgaaagataaagtagattatggttcagatgttcttgttcaaacttttttaaaagcgcatccacctggtccaagtaagcgaattgccgatgttggttgtggttacggaccaattggtttgatgattgctaaagtatcaccacatcattcaattacaatgctagatgttaatcacagagcgctagccttagttgaaaaaaacaaaaaattaaatggtattgataatgtgatcgtaaaggaaagtgatgctttgtctgctgtggaagacaaaagttttgattttattttaaccaatccaccaataagagcagggaaagaaaccgtgcatcgtatattcgagcaagcattacatagattagactcgaacggtgaactatttgttgtaattcagaagaagcaaggtatgccatctgcaaagaaaagaatgaatgaactttttggaaatgtagaagtggtaaataaagataaaggatattacattctgagaagtataaaagcttgaaatgaaatggatattctgttatagttatttaatgtaaaaatttatgttcaataagtgtgtacttttacgttaaatagataagttaattaagaataaatatagaatcgaaaatggtgtcatcattagtgttgccgttttctttttgtctttttattaatatgcttatggtatttagctaaaagcggatcacataatttttgaggggtgaatctgtttggcaggtcaagttgtccaatatggaagacatcgtaaacgtagaaactacgcgagaatttcagaagtattagaattaccaaacttaatagaaattcaaactaaatcttacgagtggttcctaagagaaggtttaatcgaaatgtttagagacatttctccaattgaagattttactggtaatttgtcattagagtttgtggattaccgtttaggagaaccaaaatatgatttagaagaatctaaaaaccgtgacgctacttatgctgcacctcttcgtgtaaaagtgcgtctaatcattaaagaaacaggagaagttaaagaacaagaagtctttatgggtgatttcccattaatgactgatacaggtacgttcgttatcaatggtgcagaacgtgtaatcgtatctcaattagttcgttcaccatccgtttatttcaatgaaaaaatcgacaaaaatggtcgtgaaaactatgatgcaacaattattccaaaccgaggtgcatggttagaatatgaaacagatgctaaagatgttgtatacgtgcgtattgatagaacacgtaaactaccattaacagtattgttacgtgcattaggtttctcaagtgaccaagaaattgttgaccttttaggtgacaatgaatatttacgtaatactttagagaaagacggcactgaaaacactgaacaagcgttattagaaatctatgaacgtttacgtccaggtgaaccaccaactgttgaaaatgctaaaagtctattgtattcacgtttctttgatccaaaacgctatgacttagcaagcgtgggtcgttataaaacaaacaaaaaattacatttaaaacatcgtttattcaatcaaaaattagctgagccaattgtgaatactgaaactggtgaaattgtagttgaagaaggtacagtgcttgatcgtcgtaaaatcgacgaaatcatggatgtacttgaatcaaacgcaaacagcgaagtgtttgaattgcatggtagcgttatagacgagccagtagaaattcaatcaattaaagtatatgttcctaacgatgatgaaggtcgtacgacaactgtaattggtaatgctttccctgactcagaagttaaatgtattacaccagcagatatcatcgcttcaatgagttacttctttaacttattaagtggtattggatatacagatgatattgaccatttaggtaaccgtcgtttacgttctgtaggtgaattactacaaaaccaattccgtatcggtttatcaagaatggaaagagttgtacgtgaaagaatgtcaattcaagatactgagtctatcacacctcaacaattaattaatattcgacctgttattgcatctattaaagaattctttggtagctctcaattatcacaattcatggaccaagcaaatccattagctgagttaacgcataaacgtcgtctatcagcattaggacctggtggtttaacacgtgaacgtgctcaaatggaagtgcgtgacgttcactactctcactatggccgtatgtgtccaattgaaacgcctgagggaccaaacattggattgattaactcattatcaagttatgcacgtgtaaatgaattcggctttattgaaacaccatatcgtaaagttgatttagatacacatgctatcactgatcaaattgactatttaacagctgacgaagaagatagctatgttgtagcacaagcaaactctaaattagatgaaaatggtcgtttcatggatgatgaagttgtatgtcgtttccgtggtaacaatacagttatggctaaagaaaaaatggattatatggatgtatcgccgaagcaagttgtttcagcagcgacagcatgtattccattcttagaaaatgatgactcaaaccgtgcattgatgggtgcgaacatgcaacgtcaagcagtgcctttgatgaatccagaagcaccatttgttggtacaggtatggaacacgttgcagcacgtgattctggtgcagctattacagctaagcacagaggtcgtgttgaacatgttgaatctaatgaaattcttgtacgtcgtctagttgaagagaacggcgttgagcatgaaggtgaattagatcgctatccattagctaaatttaaacgttcaaactcaggtacatgttacaaccaacgtccaatcgttgcagttggagatgttgttgagtttaacgagattttagcagatggaccatctatggaattaggagaaatggcattaggtagaaacgtagtagttggtttcatgacttgggacggttacaactatgaggatgccgttatcatgagtgaaagacttgtgaaagatgacgtgtatacttctattcatattgaagagtatgaatcagaagcacgtgatactaagttaggacctgaagaaatcacaagagatattcctaatgtttctgaaagtgcacttaagaacttagacgatcgtggtatcgtttatattggtgcagaagtaaaagatggagatattttagttggtaaagtaacgcctaaaggtgtaactgagttaactgccgaagaaagattgttacatgcaatctttggtgaaaaagcacgtgaagttagagatacttcattacgtgtacctcacggagctggcggtatcgttcttgatgtaaaagtattcaatcgtgaagaaggcgacgacacattatcacctggtgtaaaccaattagtacgtgtatatatcgttcaaaaacgtaaaattcatgttggtgataagatgtgtggtcgacatggtaacaaaggtgtcatttctaagattgttcctgaagaagatatgccttacttaccagatggacgtccgattgatatcatgttaaatcctcttggtgtaccatctcgtatgaacatcggacaagtattagagctacacttaggtatggctgctaaaaatcttggtattcacgttgcatcaccagtatttgacggtgcaaacgatgacgatgtatggtcaacaattgaagaagctggtatggctcgtgatggtaaaactgtactttatgatggacgtacaggtgaaccattcgataaccgtatttcagtaggtgtaatgtacatgttgaaacttgcgcacatggttgatgataaattacatgcgcgttcaacaggaccatattcacttgttacacaacaaccacttggcggtaaagcgcaattcggtggacaacgtttcggtgagatggaggtatgggcacttgaagcatatggtgctgcatacacattacaagaaatcttaacttacaaatccgatgatacagtaggacgtgtgaaaacatacgaggctattgttaaaggtgaaaacatctctagaccaagtgttccagaatcattccgagtattgatgaaagaattacaaagtttaggtttagatgtaaaagttatggatgagcaagataatgaaatcgaaatgacagacgttgatgacgatgatgttgtagaacgcaaagtagatttacaacaaaatgatgctcctgaaacacaaaaagaagttactgattaatacgcaatttacaaaacaggcaaaaagatactaagctgaattttattgatgattcggtttagtactttaagccattttaaataaatgcaaatcaatcaaatagcacagctaatctaaattgaaggaggtaggctccttgattgatgtaaataatttccattatatgaaaataggattggcttcacctgaaaaaatccgttcttggtcttttggtgaagttaaaaaacctgaaacaatcaactaccgtacattaaaacctgaaaaagatggtctattctgtgaaagaattttcggacctacaaaagactgggaatgtagttgtggtaaatacaaacgtgttcgctacaaaggcatggtctgtgacagatgtggagttgaagtaactaaatctaaagtacgtcgtgaaagaatgggtcacattgaacttgctgctccagtttctcacatttggtatttcaaaggtataccaagtcgtatgggattattacttgacatgtcaccaagagcattagaagaagttatttactttgcttcttatgttgttgtagatccaggtccaactggtttagaaaagaaaactttattatctgaagctgaattcagagattattatgataaatacccaggtcaattcgttgcaaaaatgggtgcagaaggtattaaagatttacttgaagagattgatcttgacgaagaacttaaattgttacgcgatgagttggaatcagctactggtcaaagacttactcgtgcaattaaacgtttagaagttgttgaatcattccgtaattcaggtaacaaaccttcatggatgattttagatgtacttccaatcatcccaccagaaattcgtccaatggttcaattagatggtggacgatttgcaacaagtgacttaaacgacttataccgtcgtgtaattaatcgaaataatcgtttgaaacgtttattagatttaggtgcacctggtatcatcgttcaaaacgaaaaacgtatgttacaagaagccgttgacgctttaattgataatggtcgtcgtggtcgtccagttactggcccaggtaaccgtccattaaaatctttatctcatatgttaaaaggtaaacaaggtcgtttccgtcaaaacctacttggtaaacgtgttgactattcaggacgttcagttatcgcggtaggtccaagcttgaaaatgtaccaatgtggtttaccgaaagaaatggcacttgaactatttaaaccatttgtaatgaaagaattagttcaacgtgaaattgcaactaacattaaaaatgcgaagagtaaaatcgaacgcatggatgatgaagtttgggacgtattggaagaagtaattagagaacatcctgtattacttaaccgtgcaccaacacttcatagacttggtattcaagcatttgaaccaactttagttgaaggtcgtgcgattcgtctacatccacttgtaacaacagcttataacgctgactttgatggtgaccaaatggcggttcacgttcctttatcaaaagaggcacaagctgaagcaagaatgttgatgttagcagcacaaaacatcttgaaccctaaagatggtaaaccagtagttacaccatcacaagatatggtacttggtaactattaccttactttagaaagaaaagatgcagtaaatacaggcgcaatctttaataatacaaatgaagtgttaaaagcatatgcaaatggctttgtacatttacacacaagaattggtgtacatgcaagttcattcaacaacccaacatttactgaagaacaaaacaaaaagattcttgctacgtcagtaggtaaaattatattcaatgaaatcattccggattcatttgcttatattaatgaacctacgcaagaaaacttagaaagaaagacaccaaacagatacttcatcgatcctacaactttaggtgaaggtggattaaaagaatactttgaaaatgaagaattaattgaacctttcaacaaaaaattcttaggtaatattattgcagaagtattcaacagatttagcatcactgatacatcaatgatgttagaccgtatgaaagacttaggattcaaattctcatctaaagctggtattacagtaggtgttgctgatatcgtagtattacctgataagcaacaaatacttgatgagcatgaaaaattagtcgacagaattacaaaacaattcaatcgtggtttaatcactgaagaagaaagatataatgcagttgttgaaatttggacagatgcaaaagatcaaattcaaggtgaattgatgcaatcacttgataaaactaacccaatcttcatgatgagtgattcaggtgcccgtggtaacgcatctaactttacacagttagcaggtatgcgtggattgatggccgcaccatctggtaagattatcgaattaccaatcacatcttcattccgtgaaggtttaacagtacttgaatacttcatctcaactcacggtgcgcgtaaaggtcttgccgatacagcacttaagacagctgactcaggatatcttactcgtcgtcttgttgacgtggcacaagatgttattgttcgtgaagaagactgtggtacagatagaggtttattagtttctgatattaaagaaggtacagaaatgattgaaccatttatcgaacgtattgaaggtcgttattctaaagaaacaattcgtcatcctgaaactgatgaagttatcattcgtcctgatgaattaattacacctgaaattgctaagaaaattacagatgctggtattgaacaaatgtatattcgctcagcatttacttgtaacgcaagacacggtgtttgtgaaaaatgttacggtaaaaaccttgctactggtgaaaaagttgaagttggtgaagcagttggtacaattgcagcccaatctatcggtgaaccaggtacacagcttacaatgcgtacattccatacaggtggggtagcaggtagcgatatcacacaaggtcttcctcgtattcaagagattttcgaagcacgtaaccctaaaggtcaagcggtaattacggaaatcgaaggtgtcgtagaagatattaaattagcaaaagatagacaacaagaaattgttgttaaaggtgctaatgaaacaagatcatatcttgcttcaggtacttcaagaattattgtagaaatcggtcaaccagtacaacgtggtgaagtattaactgaaggttctattgaacctaagaattacttatctgttgctggattaaacgcgactgaaagctacttattaaaagaagtacaaaaagtttaccgtatgcaaggggtagaaatcgacgataaacacgttgaggttatggttcgacaaatgttacgtaaagttagaattatcgaagcaggtgatacgaagttattaccaggttcattagttgatattcacaactttacagatgcaaatagagaagcatttaaacaccgcaagcgccctgcaacagctaaaccagtattacttggtattactaaagcatcacttgaaacagaaagtttcttatctgcagcatcattccaagaaacaacaagagttctaacagatgcagcaattaaaggtaagcgtgatgacttattaggtcttaaagaaaacgtaattatcggtaagctaattccagctggtactggtatgagacgttatagcgacgtaaaatacgaaaaaacagctaaaccagttgcagaagttgaatctcaaactgaagtaacggaataacaagtatataacagaggctaaggctttagcctcttgttatttttatgtaaattatttgatttaatgttgacgaattctcttgttcaatgttaatatattaaaggttgatgcaagcagaactttggaggataaattattgtctaaggaaaaagttgcacgctttaacaaacaacattttgtagttggtcttaaagaaacgcttaaagcgttaaagaaagatcaagttacatctttgattattgctgaagacgttgaagtatatttaatgactcgcgtgttaagccaaatcaatcagaaaaatatacctgtatcttttttcaaaagcaaacatgctttgggtaaacatgtaggtattaacgtcaatgcgacaatagtagcattgattaaatgagaattagtaagtgtttaacttactaaattttatttaacctaaaaatgaaccacctggatgtgtggtattaaaaagtgaagagaggaggacatatcacatgccaactattaaccaattagtacgtaaaccaagacaaagcaaaatcaaaaaatcagattctccagctttaaataaaggtttcaacagtaaaaagaaaaaatttactgacttaaactcaccacaaaaacgtggtgtatgtactcgtgtaggtacaatgacacctaaaaaacctaactcagcgttacgtaaatatgcacgtgtgcgtttatcaaacaacatcgaaattaacgcatacatccctggtatcggacataacttacaagaacacagtgttgtacttgtacgtggtggacgtgtaaaagacttaccaggtgtgcgttaccatattgtacgtggagcacttgatacttcaggtgttgacggacgtagacaaggtcgttcattatacggaactaagaaacctaaaaactaagaatttagtttttaattaaatcttaaacttaaaatatttaatataaggaagggaggatttacattatgcctcgtaaaggatcagtacctaaaagagacgtattaccagatccaattcataactctaagttagtaactaaattaattaacaaaattatgttagatggtaaacgtggaacagcacaaagaattctttattcagcattcgacctagttgaacaacgcagtggtcgtgatgcattagaagtattcgaagaagcaatcaacaacattatgccagtattagaagttaaagctcgtcgtgtaggtggttctaactatcaagtaccagtagaagttcgtccagagcgtcgtactactttaggtttacgttggttagttaactatgcacgtcttcgtggtgaaaaaacgatggaagatcgtttagctaacgaaattttagatgcagcaaataatacaggtggtgccgttaagaaacgtgaggacactcacaaaatggctgaagcaaacaaagcatttgctcactaccgttggtaagataaaagcttttaccctgagtgtgttctatattaatgaattttcattaagcgttcatgcttagggcatcgccatatctatcgtatttattcagtaatataaactggaaggagaaaaaatacatggctagagaattttcattagaaaaaactcgtaatatcggtatcatggctcacattgatgctggtaaaacgactacgactgaacgtattctttattacactggccgtatccacaaaattggtgaaacacatgaaggtgcttcacaaatggactggatggagcaagaacaagaccgtggtattactatcacatctgctgcaacaacagcagcttgggaaggtcaccgtgtaaacattatcgatacacctggacacgtagacttcactgtagaagttgaacgttcattacgtgtacttgacggagcagttacagtacttgatgcacaatcaggtgttgaacctcaaactgaaacagtttggcgtcaggctacaacttatggtgttccacgtatcgtatttgtaaacaaaatggacaaattaggtgctaacttcgaatactctgtaagtacattacatgatcgtttacaagctaacgctgctccaatccaattaccaattggtgcggaagacgaattcgaagcaatcattgacttagttgaaatgaaatgtttcaaatatacaaatgatttaggtactgaaattgaagaaattgaaattcctgaagaccacttagatagagctgaagaagctcgtgctagcttaatcgaagcagttgcagaaactagcgacgaattaatggaaaaatatcttggtgacgaagaaatttcagtttctgaattaaaagaagctatccgccaagctactactaacgtagaattctacccagtactttgtggtacagctttcaaaaacaaaggtgttcaattaatgcttgacgctgtaattgattacttaccttcaccactagacgttaaaccaattattggtcaccgtgctagcaaccctgaagaagaagtaatcgcgaaagcagacgattcagctgaattcgctgcattagcgttcaaagttatgactgacccttatgttggtaaattaacattcttccgtgtgtactcaggtacaatgacatctggttcatacgttaagaactctactaaaggtaaacgtgaacgtgtaggtcgtttattacaaatgcacgctaactcacgtcaagaaatcgatactgtatactctggagatatcgctgctgcggtaggtcttaaagatacaggtactggtgatactttatgtggtgagaaaaatgacattatcttggaatcaatggaattcccagagccagttattcacttatcagtagagccaaaatctaaagctgaccaagataaaatgactcaagctttagttaaattacaagaagaagacccaacattccatgcacacactgacgaagaaactggacaagttatcatcggtggtatgggtgagcttcacttagacatcttagtagaccgtatgaagaaagaattcaacgttgaatgtaacgtaggtgctccaatggtttcatatcgtgaaacattcaaatcatctgcacaagttcaaggtaaattctctcgtcaatctggtggtcgtggtcaatacggtgatgttcacattgaattcacaccaaacgaaacaggcgcaggtttcgaattcgaaaacgctatcgttggtggtgtagttcctcgtgaatacattccatcagtagaagctggtcttaaagatgctatggaaaatggtgtcttagcaggttatccattaattgatgttaaagctaaattatatgatggttcataccatgatgtcgattcatctgaaatggccttcaaaattgctgcatcattagcacttaaagaagctgctaaaaaatgtgatcctgtaatcttagaaccaatgatgaaagtaactattgaaatgcctgaagagtacatgggtgatatcatgggtgacgtaacatctcgtcgtggacgtgttgatggtatggaacctcgtggtaatgcacaagttgttaatgcttatgtaccactttcagaaatgttcggttatgcaacatcattacgttcaaacactcaaggtcgcggtacttacactatgtacttcgatcactatgctgaagttccaaaatcaatcgctgaagatattatcaagaaaaataaaggtgaataatataacttgttttgactagctagcctaggttaaaatacaaggtgagcttaaatgtaagctatcatctttatagtttgattttttggggtgaatgcattataaaagaattgtaaaattctttttgcatcgctataaataatttctcatgatggtgagaaactatcatgagagataaatttaaatattatttttaattagaataggagagattttataatggcaaaagaaaaatttgatcgttctaaagaacatgccaatatcggtactatcggtcacgttgaccatggtaaaacaacattaacagcagcaatcgctactgtattagcaaaaaatggtgactcagttgcacaatcatacgacatgattgacaacgctccagaagaaaaagaacgtggtatcacaatcaatacttcacacattgagtaccaaactgacaaacgtcactacgctcacgttgactgcccaggacacgctgactatgttaaaaacatgatcactggtgctgctcaaatggacggtggtatcttagtagtatctgctgctgacggtccaatgccacaaactcgtgaacacattcttttatcacgtaacgttggtgtaccagcattagtagtattcttaaacaaagttgacatggttgacgatgaagaattattagaattagtagaaatggaagttcgtgacttattaagcgaatatgacttcccaggtgacgatgtacctgtaatcgctggttcagcattaaaagctttagaaggcgatgctcaatacgaagaaaaaatcttagaattaatggaagctgtagatacttacattccaactccagaacgtgattctgacaaaccattcatgatgccagttgaggacgtattctcaatcactggtcgtggtactgttgctacaggccgtgttgaacgtggtcaaatcaaagttggtgaagaagttgaaatcatcggtttacatgacacatctaaaacaactgttacaggtgttgaaatgttccgtaaattattagactacgctgaagctggtgacaacattggtgcattattacgtggtgttgctcgtgaagacgtacaacgtggtcaagtattagctgctcctggttcaattacaccacatactgaattcaaagcagaagtatacgtattatcaaaagacgaaggtggacgtcacactccattcttctcaaactatcgtccacaattctatttccgtactactgacgtaactggtgttgttcacttaccagaaggtactgaaatggtaatgcctggtgataacgttgaaatgacagtagaattaatcgctccaatcgcgattgaagacggtactcgtttctcaatccgtgaaggtggacgtactgtaggatcaggcgttgttactgaaatcattaaataatttctaatttcttagattttatataaaaagaagatccctcaatcgaggggtcttttttttaatgtgtaaattttgtaatggctgttcaatttagaagaacaataattgatgagaggttgactaataaaacttataactgataatacagtttaaataaaattgttgagccttggacattgtaaaatgctcctctcaaagttttcatttttcaatgtctactttgaaggagcattacattagtttatgtctcagattcatatctttcaattaatttaaatgcttaatttgttttaaatacttgctctaattcaatgattttcaaaaatacagctacagcgtattttaatgatttttcatcaatatcaaatttgggattatggtgtggcgctgtaatacctttactttcattaccgcaaccagtcagaaagaatgcacctggtcgtactttcaaataatgtgaaaaatcttctccaatcatcattaaatctgattcattaaagcgtacatgtaagtcatttgttgcttctttaataacttgatatgctttctcgttgttatggacaggcaagtatcctttaatataattcaagtcatattcaatgtcatttgcaattgccaaaccttgtagtagcttatccattttatgcatgacatgttcttgtattttcgagtcaaatgtacgaactgtacctttacaaaatgcttgatcaggaataacgctatctgtggtgcctgcttgaatcattccaaatgaaagtacagcttgtttaactggatcaatcgtacgtgaaattattttttgtgcacttaaaatgaactctgccatgattactattgggtcaatggtttcatgaggtttggcaccatgaccgccacgacctttaattgtgacactaaattcatctggagaggccatgattgcccccgcacgcgaatgaatagttccagtaggataaccactccataaatgtgtaccgtaaattctatctacattttccagacatccagcatcaatcatttcttgagaaccacctggcatgatttcttcaccgtactggaatattaatacaacattaccttctaataaatgtttatgttcatctaaaatttctgctacggtaagtaaaattgctgtatgaccatcatgcccacacgcatgcatacatcctggatttttagacttataaggcacatcgtttaattcctcgacaggtaacgcatcaaagtcagctcttaatgcaatggtaggtcctgtgcccaaacctttaaatgtggctttgataccattgcggccgataggagtttcaatatcacaagataactggcttaattggttaacaatataatcatgtgtttgaaattcttcaaaagataactcaggatattggtgtaaataacgtctgagttgaattgttttattttctttattatttgctagttgaaaccaatctaacaccctaatcactactttctaaaatattgtttatagtataacattttatgaaattatcgtactaaatgattgctttgagatattttatctatgaatgataaggctttcaagttatgtagaattactgtatgataaaggtattaccaaacaatacttaagggggattatatactgtggttcaatcattacatgagtttttagaggaaaatataaattatctaaaagaaaatggtttgtataatgaaatagatacaattgaaggtgcaaacggaccagaaatcaaaatcaatgggaaatcatacattaacttatcttcaaataattatttaggactagcaacaaatgaagatttgaaatcagctgcaaaagcagctattgatacacatggtgtaggtgcaggcgctgttcgtacaatcaatggtacattagatttacacgacgaattagaagaaacactagcaaaatttaaaggaacagaagctgcaatagcttatcaatcaggatttaattgtaatatggctgctatttcggctgttatgaataaaaatgatgctattttatcagatgagcttaatcatgcatcaattattgacggatgtcgcttatcaaaagctaaaattattcgagttaaccattcagacatggatgatttacgtgcgaaagcaaaagaagcagttgaatcaggtcaatacaataaagtgatgtatatcactgatggcgtttttagtatggatggtgatgtggctaaattacctgaaattgtagaaattgcagaagaatttggtttattaacttatgttgacgacgctcatggttcaggtgttatgggcaaaggcgctggtacggttaaacattttggtttacaagataaaatcgatttccaaattggtacgctttctaaagcaattggtgtcgttggcggttatgtagcaggtacaaaagagttaatagattggttaaaagcacaatcacgaccattcttattctctacatcattagcacctggggatactaaagcaatcactgaagcagttaaaaagttaatggcttcaactgaattacatgataaattatgggacaatgcacaatatttaaaaaacggattgtcaaaattaggatatgatacaggagagtcagaaactccgattacaccagtaattattggtgaagaaaaaacaactcaagaatttagtaagcgtttaaaagacgaaggtgtctatgtgaaatctatcgttttcccaacagtgccaagaggtacaggacgtgtaagaaatatgcctacagctgcacatacaaaagacatgttagacgaagcaattgcggcttatgaaaaagtaggaaaagaaatgaatttgatttaatttaatatatatttattcccacggcaaatatcgtcgtgggttttttcttttataaatgcttagtttattaacagtaagttcttataacaatgtttagtgttgtcaaccattaaagtttgaattttaaaagcatcttgtagaatttagttgtatttttacgattaaattcattttgattatttttgataataagcattttaatagtaatacatgtttatagtgtgtagcatatgtctatactagtagtaactatatagagaaagtaggaataaactatgtcacaagatgtaaataaattaagtaagcaaccaacgccagataaagcagaagataacgcatttttcccatcaccatattcccttagtcaatatacagcacctaaaacagattttgatggtgttgaacacaaaggtgcctataaagatggtaaatggaaagtattgatgattgctgctgaagagagatatgtattattggaaaatggaaaaatgttctctacgggtaatcatcctgttgaaatgttattacctttacatcatttaatggaagcaggttttgacgttgatgttgcgacattatctggttatccagctaaattagaattatgggctatgccaactgaagacgaggcagttataagcacttataataaattgaaagaaaaattaaaacagccaaaaaaattagcagatgtgattaaaaatgaattaggacctgattcagactatttatctgtctttatcccaggcgggcatgctgcagttgttggtatttctgaaagtgaggacgttcaacaaacattagattgggcattagaaaatgaccgctttatagttacattatgtcatggaccagccgcactactttcagcaggtcttaacagagaaaaatctccattagaaggatactctgtttgtgttttccctgactcattagatgaaggtgcaaatattgaaataggttatttacctggacgtttgaaatggttagttgctgatttattaactaaacaaggtttaaaagtagttaacgacgatatgacaggaagaacgttaaaagatcgtaaattattaacaggtgacagtcctttagcttcaaatgagttaggaaaattagcagttaatgaaatgttaaatgcaatacaaaataaataattaaatattaattagaggagccccatatgtaaatgtatgagggctctttttttggcaaaattttagtgatacttgtaaaatagaacctattatgagtatgatttaagaaaacgcttgcaaaactaataactgcaactagcgatatggaggaaacatgatgtcttatagcattggaattgattatggaactgcttcaggccgtgtgtttttaattaatacaactaacggtcaagtagtatcaaaatttgtgaaaccatatacacatggtgtcattgagggtgaattaaatggtttaaaaataccacatacatatgcacttcaaaatagtaatgattatttagaaattatggaagaaggaatatcatatatagtacgtgaatcaaaaatagatccagtcaatatagtaggtattggtatagactttacttcatctactattatttttactgacgaaaaccttaacccggtacataatttaaaacaatttaaaaacaatccacatgcgtatgtgaaactttggaaacatcatggtgcatataaagaagcagagaaattatatcaaactgctattgaaaataataataagtggttaggccattatggatataatgttagtagtgaatggatgattcccaaaataatggaagtcatgaatcgagcaccagaaattatggaaaaaacggcttatattatggaagcgggcgattggattgtaaataaattaactaataaaaatgtacggtcgaattgtggattaggtttcaaagcattttgggaagaagaaacagggtttcattatgatttgtttgataaagtagaccccaaattatcaaaagtaattcaagataaagtatctgcaccggttgttaatattggtgaagcagtagggaaactggatgataaaatggcacagaaattaggattatcaaaagacactatggtaagtccttttattattgatgcccatgctagtttattaggtattggatctgaaaaagataaagaaatgactatggtgatgggaacaagcacatgccatcttatgttaaatgaaaagcaacatcaagtgccaggtatatcaggttctgtaaaaggagcaattattccagaattatttgcttatgaagcggggcaatcagcagtaggtgatttgtttgagtatgtcgctaagcaagcaccaaagtcatatgtagatgaagcagcaaatagaaatatgactgtatttgaattaatgaatgaaaagataaaacatcaaatgccaggtgaaagtgggctcattgctcttgattggcataatggaaatcgaagtgtattaagtgatagcaatttaacaggttgtatctttggattaactttacaaactaagcatgaggatatttatagagcatatttagaagctacagcatttggtactaagatgattatgcaacagtatcaagattggcatatggaagtagaaaaggtatttgcatgtggcggtatacctaaaaagaatgctgttatgatggatatctatgcgaatgtactgaataaaaaactaattgttatggatagtgagtatgcaccagcaataggagcagcaatattaggtgcagtcagtggtggcgcacataattcaattaatgatgcagttgatgctatgaaagagccaattttatacgaaattaatccagaagcggaaaaagtacaaaggtatgaaacattatttaaagcttataaggctttacatgatatccatggttataaaaaagctaatataatgaaagatatccagagtttaagagttgagggataaaaaatttaatttgacagtaattagcaatattaaacgctataaattactaaaatcaattaatacagctagaatttccatttacagaaatatcagcaaaatgtacatgtcatatatacaagaaagcgcttttatattataattattatgaaaatgaatattatgtcctcttgtgatggactatggttatatagaagagacaaaggagatatttctatgaaaaaaattatgattactggtgcattaggacaaattggtacagaattagttgttaagtgcagagaaatttatgggacagataatgttcttgctacagatattagggaacctgaagcagactcacctgtacaaaatggaccatttgaaatcttagacgtaacagatcgtgaccgtatgtttgagttagttagggactttgaagcggatagtctaatgcatatggcagcattattatcagcaactgctgagaaaaatccaattcttgcttgggatttaaatatgggtggattaatgaatgcattagaagctgcaagaacttataatttgcactttttcacaccaagttcaattggtgcatttggagactcaactcctaaagttaatacgccacaagtaacgattcagcaacctacgacaatgtatggtgtaaataaagtagctggcgaattgttgtgtcaatattatttcacacgatttggtgtagatacaagaagtgttagattccctggtttaatctcgcatgttaaagaaccgggtggtggcacaacggactacgcagttgaaatttacttcaaggctgtaagagaaggacattatacaagcttcatagataaagggacatatatggatatgatgtatatggatgatgcgattgatgcaattattaaacttatggaagcagacgatgcgaaattagaaacaaggaatggttataatttaagtgcaatgagctttgatccagaaatggttaaagaagcaatacaagaatattacccagatttcaaattagaatatgatgttgaccctattagacaaggtatcgctaatagttggccggattctattgatacaagctgttcacgtggcgaatggggatttgatcctaaatatgatttagtgagcatgactaaattaatgttagaagctattgaacaaaaagatactgttaaaaataataactaatcatttccattcactttaatacacggaatgatattttaaattactctttattttaataaactagtgcatgaattctaatattattaattatacatattgaattcgcgagcttagttcatttttaaataaagagtttttgtattaaaaagatataattcaaacacagattacttgtctctatgaaaataatacgtttatactaaaagatataggctttctgaaaaagtgttaattaatttcgaatttttagaaaatttattgaacagtaaaatagggattgttataatttatgttaaacaaattcttatactatattattaggaggcaatcaccatgtcacaagcagttaaaattgaattacgcgaaacattaaaagaaaaaccagatacatctcaattaggatttggtaagtattttacagattatatgttgagttatgattatgatgcggataaaggatggcatgatttgaagattgtaccttatggtccaattgaaatttcgccagcagcacaaggtgttcactatggacaatcagtgttcgaaggtttaaaagcatataaaaaagatggagaggttgcacttttccgtccagatgaaaactttaagcgtcttaataactcgttagcacgcttagaaatgcctcaagtcaatgaaggtgaattgctagaaggacttaagcaattagttgatttagagagagaatgggttccggaaggtgaaggtcaatcattatatattcgtccttttgtttttgcgacagaaggggtacttggcgttggtgcatcacatcagtataaattattaattattttatctccttcaggtgcatattatggtggtgaaactttaaaaccaactaaaatctatgtagaagatgaatatgtacgtgctgttcgtggcggtgtaggctttgcgaaagttgcaggtaactatgcggcaagtttattagcacaaactaatgcaaataaattaggttatgaccaagtattatggcttgatggtgttgaacagaaatatatcgaagaagttggtagcatgaacattttcttcgttgaaaatggcaaagtaattacaccagagttgaatggcagtattctacctggtattacacgtaaatctattatcgaattagctaaaaacttaggatatgaagtcgaagagcgccgcgtttcaatcgatgaattattcgaatcatatgataaaggtgagttaacagaagtatttggtagtggtactgcagcagttatttcacctgtaggtacattgagatatgaagatcgtgaaatcgttattaataataatgagactggtgaaattactcaaaaattatacgacgtctatactggtattcaaaatggtactttagaagataaaaatggttggagagtcgttgtaccaaaatattaataaaaattgaatatgatcatgaaaacaaaatgtaaaagttaatcatgactaaaatccctttcaatgaagcgaagcatggtaataaattaagtttacaatgtttattgttaagtattgaaggggatttcacttattattatatttaattcaatatttaaaaagaacaatactacgagttcattttcaggggaataacgaacatcatagaatcagcataatacgaaataaataaataggagtattgatattaatggaatggatattatttgataaagatggtacgttaattgaatttgatagaagttgggaaaaaataggggtacgatttgtacaatcattgcttgagacttttccagtacataataaagaagctgctttaagacaactcggtgtcattaaagaatctattgatccaaaatcagtgatgggttcaggatctttacaacaaattattcaggcatttaatgatgtgacgggacaagatacaaccgactggtccaagtcaacaagtcaaaagttggtagatgaacgtattcctgaaattaattgggtagaaggtgttaaagaagcacttatcgatttgaaagcaaaaggctatcaactaggtattgttacgagtgatactaaaaaaggtgtagaacaatttttagcacataccaatgctacctcgttgttcgatttgatcatttctaccgaagcggatgcctatgagaagccaaatcctaaagtattatcgcctttatttgagcaatataatgtagatcctcagaaagtagctatagtaggagacactgctaatgatatgaaaaccgctagtaatgcaaatttaggtatggcaataggtgtattaacaggtattgcaacaaaagaagaattacatgaagctgatattattttaaatagtgcggcagatattttagaagctttaatttaaaaagtaagacatagtgtatatgtgaatcaatgtaaccaatagaattgataatgtaatcgatgatatctatggaatatacattgaatataaacatatacgctatgtctttagtcttttatcgtgtatctacttgtcgatatgtttgaataattcgagcaattttgtctatcataggatttaaagattcggggtccttatggatatcatattcattaatattgatacgtaccacaggacatgcattaaagctattaatccaatcgtcatagcgtttaaatagctttttccagtattcagggtctgtattaatttccatttcgcgaccgcgttcaataatacgatcaatgacctcatcatagttacattctaaataaatcattacatcaggtttaggaaaataaggtgtcatgaccatggcattaaataagtctgaatatgttttgaaatcctctttactcattgtgccttcttcttcatgcatttttgcaaaaatatcaacatcttcataaattgatcgatcttggacaaagccaccaccatattcaaacatacgcttttgttctttaaagcgttcagctaagaaataaatttgtaaatggaaactccatcgttcaaaatcgctgtaaaatttatctaaatatggattatgttcgacattttcaaaagacgttttaaagtttaatttatctgcaagtgcttgcgttagtgttgatttcccaacaccaactgtacctgcaatggttataatggcattttgtggaataccgtaattattcattggtaatatctcctatcataggtaatataatatgtaatatatcttcgtaatcttgttcattttttagaaaatcaatagaagttgtatcgattaaaactacatttgaaccattactttgtaaggactcataatactcacgataatctttttttaactttaacagatattcatcttctatttgatgctcaaaactacggttacgtttagcaattctagattttaacacatcaaggtctgcatctaaaaagataatcatattcggcataatcatatcttcagttaaaatatcataaattttactgaatttctgaaattcaacagaactcaaagtatttttagcaaatatcttatttttatgtatatgataatcactaactacaccttgatttagttgtgttacatcttgaaattgcttatatctattgcataaaaagaacatttcagtttgaaaactccatttagagatatcttcataaaagtctgataaaaatggattttctgtgatgatttctttttcttcataaaaatctaaagtttgacttaatttgtgtgcaagtgaagatttacctacgccaataggaccttcaattgctataaaaggtttgttcatattcacatctccaaatgttaaaatagacattgagtattgtaccataagtgaggtatctggacataaatgacaaatgatatatattttatgacattagcgattgaagaagctaaaaaggcagctcaactaggcgaagtacctataggtgctatcatcactaaagatgatgaagttatcgctagagcacataatttaagagaaacactacaacaaccaacggcgcatgctgaacatattgcaattgaacgtgcagccaaagtgttaggtagttggcgtttagaagattgcacattatatgtaaccttagaaccatgtgtcatgtgcgcaggaacaattgtaatgagtcgcattccaagagtcgtctatggcgcagatgatcctaaaggtggttgtagtggcagtttaatgaatttattgcaacaatctaattttaatcatcgtgcaattgttgataaaggtgtacttaaagaagcatgtagcacattattaacaacattttttaaaaacttaagagccaataagaaatccaccaattagacgatagtacatactaattaaaatttgttagaattacattatatgataaattaatgacaatataaatgttaatagaaaagtatgtgcactgagtatatattcttatgtaagaacaagattttaaatttacgaaacgaggtaacataatgataaaactaatagccactgatatggatggcacgctacttaatgcagcacatgaaatttctcaacctaatattgatgcgattaaatacgctcaagaacaagggataacggttgttatcgcgacaggtcgagcattttatgaagcacaagcaccagttgctgacacagatttaacagtaccatatatttgtttgaatggtgctgaagtacgtgatgaaactttcaatgtaatgagcacttcacaccttaataaatcgttagtacacaaaattacaaatgttttaaaagatgcaggtatttattatcaagtatacacgagtcgtgcgatttatactgaagatccacaaagagatttagacatttacatagatattgctgagcgtgcaggtcaacacgcaaacgttgagcgtattaaaaatggtattcaaagacgcatagataatggtacgttgaaagttgttgataattatgatgctattgaaaacatacctggtgaattaattatgaaaatattagcatttgatggaaatttagaaaaaattgacaaagctagtaaaattttagctgaatctccgaatttagctatatcatcatcttcgagaggaaatatagaaataacgcattcagatgcacaaaaaggcattgcgctagaaacaattgccgaaagattagggattgaaatgaaagatgtcatggcaataggtgacaatttaaatgacgtatcaatgttagagaaagttggctatccagttgcgatggaaaatggtgctgaagaagttaaaaaaatagcgaaatatgtcacagatacgaatgaaaatagtggtgttggaaaagctattatgaaattattacgtgaacaacaagtttaataaaaaagaggggtcaaatatgaaaggattaattattattggcagtgcacaagtgaattcacatacaagtgcactagcaagatacttaactgagcattttaaaacacatgatattgaagcggaaatattcgatttagcagaaaaaccgttaaatcaattagatttttcaggaacaacaccgtctattgatgaaatcaaacaaaatatgaaagatttaaaagagaaagcaatggcggcggactttttaatattaggaacgccaaactatcatggttcatattctggaatattgaaaaatgcattagatcatctaaatatggattattttaaaatgaaacctgtaggcttaataggaaatagtggtggaattgttagttcagagccattgtcacatttaagagtaatcgtcagaagtttactaggcattgcagtaccaactcaaatagcaacacatgattctgattttgctaaaaatgaagatggttcatattacttaaatgatagtgaattccaattacgagcaagattatttgtcgatcaaattgtatcttttgtgaataatagcccatatgaacatttaaaataaattaaaaaatatgtaaatatacattaaaaataggtatgtagcttaaggtatttcattgagaatgcttttaagtcacatgcctatttttttgttctaatgcaccaatagtaagcctttgagtttactattgtgagcaatgttattaaataaaataagatgtaatagcgaattgaaaacaagcttagattaaaaggaaagtttaaaaatatagataaataatttaaaacaatggaagaaaaaaagtattaaaaattgcaattcttaatctgaaatgcatattaatatttactataaataacattgtaaaataaaataaaaaaattaaaacattgtactttatcgaaaagtgtattaagatagaaaggcagaaatttttatatgcaaaatattatatttatcaaattttgatattttaaaggagtattattaaatgaataataaaaagacagcaacaaatagaaaaggcatgataccaaatcgattaaacaaattttcgataagaaagtattctgtaggtactgcttcaattttagtggggacaacattgatttttgggttaagtggtcatgaagctaaagcggcagaacatacgaatggagaattaaatcaatcaaaaaatgaagcgacagctccaagtgagaataaaacaactgaaaaagttgatagtcgtcaacaaaataatgttgaacaaagtacaacgtcaaaccaaccaaaagtaaatgagtctgataatacttcagttaaagaaactactgaagaacctcaaaatacaacttctacacaaccaactaaaaaaaataacgatgcgacagcaaataaagataatttagcggctcaaaatatttcaacgcaggctaatgatgtttcagctactcctaaaacaacgactattaaaccaagaacattaaaccgtatggctgtgaacacagtagcagcaccacaacaaggtacaaatgtaaatgataaagttcatttttcaaatattgatattgctattgataaaggacatgtcaattctacaacaggtaaaactgaattttgggcgacttctagtgatgttttaaaattaaaagcgaattacacaatcgatgattctgttaaagagggcgatacatttacatttaaatatggacagtatttccgtccgggttctgtaagattaccttcacaaactcaaaatttatataatgcccaaggtaatattattgcaaaaggtatttatgatagtacaacaaacacaacaacatatacttttacgaactatgtggatcaatatacaaatgttagtggtagctttgaacaagttgcatttgcgaaacgtgaaaatgcaacaactgataaaactgcttataaaatggaagtaactttaggtaatgatgcgtatagcgaagaaatcatcgtcgattatgataataaaaaagcacaaccgcttatttcaagtacaaactatatcaataatgaagatttatcacgaaatatgactgtttatgtaaatcaacctaaaaatacatacacaaaagaaacatttgttagtactttaacaggttataaatttaatccagatgcaaaaaactttaaaatttatgaagtgacagatcaaaatcaatttgttgatagctttacacctgatacttcaaaacttatagatgttactgataaattcaaaatcacatacagcaatgataataagactgcaacagttgatttaatgaatggtcaaacaaatagtaataaacaatatattattcaacaagttgcttatccagataatacatcaacagataatggaaaaattgattatacattagatacagacaaaactaaatacagttggtcgaacagttattcaagtgtaaacggctcatcaactgctaatggcgaccaaaagaaatataatctaggtgactatgtatgggaagatacaaataaagatggtaaacaagatgccaatgaaaaagggattaaaggtgtttatgtcattcttaaagatagtaacggtaaagaattagatcgtactactactgatgaaaatggtaaatatcagtttacaggattgggaaatgggacttacagtgtagaattttcaacgctagcagggtacacaccaactactgtaaatgcaggaactgatgatgctgtagattctgatggactaactacaacaggtgtcattaaagacgctgataacatgacattagacagtggtttctataaaacgccaaaatacagtttaggtgattatgtttggtacgacagtaataaagatggcaaacaagattcaactgaaaaaggaattaaaggtgttaaagttactttgcaaaatgaaaaaggcgaagtcattggtacaactgaaacagatgaaaatggtaaataccgctttgataatttagatagcggtaaatacaaagttatttttgaaaagcctgctggcttaaaacaaacaggtacaaatacaactgaagatgataaagatgcagatggtggcgaagttgacgtaacaattacggatcatgatgatttcacacttgataacggatacttcgaagaagaaacatcagacagtgactcagacagtgattcagattcagatagcgattcagactcagatagcgattcagactcagacagtgaatcagactcagacagcgactcagattcagacagcgactcagactcagacagcgattcagactcagaaagcgactcagattcagaaagcgactcagactcagacagcgattcagactcagatagcgactcagattcagacagcgactcagattcagaaagcgactcagactcagacagcgactcagattcagacagcgactcagactcagatagtgattcagattcagacagcgactcagattcagaaagcgactcagactcagatagtgactcagactcagatagtgaatcagactcagatagcgattcagactcagaaagcgactcagattcagacagcgattcagaatcggatagcgactcagacagcgactcagactcagacagtgattcagaatcggatagcgactcagactcagacagcgactcagactcagatagcgactcagattcagacagtgactcagattcagacagtgactcagatagcgactcagattcaggaaaacatacacctgtgaaaccaatgagtgctactaaagatcatcacaataaagcaaaagcattaccagaaacaggtagtgaaaataacggctcaaataacgcaacgttatttggtggattattcgcagcattaggttcattattgttattcggtcgtcgcaaaaaacaaaataaataatacaatatgacccaggtccttgtggcctggtttttctgtttagaaatttccagatataaaacaaaaaatctttaaggaatagatataatttaatttgttacagaaatgtaattgtctatgaattagaaaagctaagatattaattttaagggcaaataatactattttttatgatgattaaataaaaattacaaaactcataaaaacttttatttaactacaaatgttaaataacgttttacgataaagaaaataattaaagtattgtgctttatctaaaaatgtaatactatattgatatacatttttgtatttaaaacaattgtattatttaaaaatttgatgaattaggagtaatctaatgctaaacagagaaaataaaacggcaatgacaagaaaaggcatggtatcaaatcgattaaataaattttcgattagaaagtacacagtgggaacagcatcaattttagtaggtacaacattaatttttggtatagggagccaagaagctaaagctgcagaagtaaccaacaaggaaatgaaggaagatgcaacatcagtaaataatgatcaagtgtctaaaaaagttgatacagggcaactaaataatgacggtaatactagtaaagttgatacagagcaactaaaagatgagaatattaataaagttgctaatcaaaaagaagtaactagagtagaaaatagtgtcgctttagaaaaaaataataactctcaaccatctgaaaatggaaaattacaaacgtcggatgttaaaaaaactgatgataataatgcaacttcagatgatcaagttactactacagttaattcacagcaattaaatactgataacacaactgcaaatgcaacaatgtcgtcagcaccaattaatgtaagtaaagatgacttaaaaattaatagtgaagaagtaagaaatgtagaagaaaaaagagataatactgacaatgcaaatagttcagaattaataaagccgaaaagcacagcgcctaaacgtttgaatacgagaatgcgtatggcagcagtacaaccatcatcaacagattctaaaaatgttaatgatttaatcacatcaaatacaacattaactgtcgttgatgcagataaaaacaataaaatcgtaccagcacaagattatctagcattaaaatcacaaattaaagttgatgacaaagttaaatcaggtgattatttcacaataaaatactcagatacagtacaagtatatggattgaatccagaagatattaaaaatattggtgatataaaagatccaaataatggggaaacaattgcaactgcaaaacatgatactgcaaataatttaattacatatacatttacagattatgtcgatagatttaattctgtacaaatgggaattaattattcaatttatatggatgctgatacaattccagttagtaaaaacgatgttgagtttaatgtaacgattgggaatgatacaacaaagactactgcaaacattcaatacccagattatgtttctagagataataattctataggttcagcatttactgaaactgtctcacacgcaggtaatgcagaagacccgggttactataaacagactgtttatgtaaatccatcggaaaaatctttaacaaatgctaaattaaaagttgaagcttatcataaggattatcctgacaatgtaggtcaaataaataaagatgtaactaaaattaaaatttatcaagcaccaaaagactatgttttaaacaaaggttatgatgttaatacaaatcagctaatagatgtaacagaacaatttaaagataagattacatacggagctaatgacagtgtaaatgttgattttggtagcattaataattcttatgtagttatggtggatacaaaatttgaatatacaactagtgaaagtccaacacttgttcaaatggcaactttgacttctgatggaaatagatccgtttctactggtaatgctttaggattcactaataaccaaagtggcggcgctggtcaagaagtatataaaattggtaactacgtatgggaagatacaaataaaaacggtgttcaagatttaggggaagttggagtaaaaggtgtaacagtggttgcatatgacaataaaactaataaagaagttggaagaacaattactgatgacaaaggtggatacttgattccaaacttacctaatggagattaccgtgtagaattttcaaatttaccacaaggttatgaagtaaccccttcaaaacaaggtaataatgaagaattagattcaaacggtgtatcatcagttattacagttaatggcaaagataatttatctgctgacttaggtatttacaaacctaaatacaatctaggtgactatgtatgggaagatacaaataaaaatggtatccaagaccaagatgaaaaaggtatttcaggtgtaacagttactttgaaagatgaaaacggtaacgtgttaaaaacagtaacaacagatgctgacggtaagtataaatttactgatttagataacggtaattataaagttgaatttactacaccagaaggctatacaccgactacagtaacatccggtagcgatattgaaaaagactctaatggtttaacaacaacaggtgttattaatggtgctgataacatgacattagatagtggattctacaaaacaccaaaatataatttaggtaattatgtatgggaagatacaaataaagatggtaagcaggattcaactgaaaaaggtatttcaggcgtaacagttacattgaaaaatgaaaacggtgaagttttacaaacaactaaaacagataaagatggtaaatatcaatttactggattagaaaatggaacttataaagttgaatttgaaacaccatcaggttacacaccaactcaagtaggttcaggaactgatgaaggtatagattcaaatggtacatcaacaacaggtgtcattaaagataaagataacgatactattgactctggtttctacaaaccgacttacaacttaggtgactatgtatgggaagatacaaataaaaacggtgttcaagataaagatgaaaagggcatttcaggtgtaacagttacgttaaaagatgaaaacgacaaagttttaaaaacagtaacaacagatgaaaatggtaaatatcaattcactgatttaaacaatggaacttataaagttgaattcgagacaccatcaggttacacaccaacttcagtaactactggaaatgatactgaaaaagattctaatggtttaacaacaacaggtgtcattaaagatgcagataatatgacattagacagtggtttctataaaacaccaaaatacagtttaggtgattatgtttggtacgacagtaataaagatggcaaacaagattcaactgaaaaaggtatcaaagatgttaaagttactttattaaatgaaaaaggcgaagtaattggaacaactaaaacagatgaaaatggtaaatatcgtttcgataatttagatagcggtaaatataaagttatttttgaaaagcctgctggcttaacacaaacaggtacaaatacaactgaagatgataaagatgcagatggtggcgaagttgacgtaacaattacggatcatgatgatttcacacttgataacggatacttcgaagaagatacatcagacagcgactcagactcagacagtgattccgattcagaaagcgactcagactcagatagtgaatcagactcagacagtgattcagactcagacagtgactcagactcagatagcgattcagattcagaaagcgactcagactcagacagtgactcagattcagatagcgattcagactcagatagtgattcagattcagaaagcgactcagattcagaaagcgattcagactcagatagcgattcagactcggatagcgactcagactcagatagcgactcagattcagactcagacagtgactcagacagtgactcagacagtgattcagactcagatagcgattcagattcagacagtgactcagactcagacagtgactcagattcagatagcgactcagattcagatagcgactcagactcagatagcgactcagactcagatagtgactcagactcagacagtgactcagattcagacagcgattcagactcagatagcgactcagattcagacagtgactcagactcagatagcgattcagattcagatgcaggaaaacatacacctgtgaaaccgatgagtgctactaaagaccatcacaataaagcaaaagcattaccagaaacaggtagtgaaaataacggctcaaataacgcaacgttatttggcggattattcgcagcattaggttcattattgttatttggtcgtcgtaaaaaacagaataagtaatttgcttaaccaaaccaggtccgtgaggcctggttttttatttcaaaatttatgaaatgtatcttatgtttgagattaaatagtgcaatattttaaaagatataacatacatcaacataaatttaattcatctttatattaaaagtacagacaaataagaaaaacaattaaacacagtttcaaaccatttaaaacaattagtataaaaagtaaatagataattaaaaatcaataaaattaagttattcaaaccaaagtgtaaaataacagttgaaaataaataaatttatttaaagtattgtgctttatctaaaaatgtattacgatgggaatacaaatttttatatgtaaaaatattagttttttgcaaatattgatattttaaaggagatttatatgattaacagggataacaaaaaggcaataacaaaaaagggtatgatttcgaatcgcttaaacaaattctcgattagaaagtatactgtaggaactgcatcgattttagtaggtacgacattgatttttggtctagggaaccaagaagctaaagctgctgaaaacactagtacagaaaatgctaagcaagatgaggcatcggctagtgataataaagaagtagtgtcagaaactgaaaataattcgacacaaaaaaatgatttaacaaatccaattaagaaagaaacaaatactgattcacaccaagaagctaaagaagcaccaactacatctagtactcaacaacagcaaaataatgctacaacttcaactgaaactaagcctcaaaacattgaaaaagaaaatgttaaaccttcaactgataaaactgcgacagaagatacatctgttattttagaagagaagaaagcgccaaataatacaaataacgatgtaactacaaaaccatctacaagtgaaattcaaacaacaccaactacacctcaagaatctacaaatattgaaaattcacaaccgcaaccaacgccttcaaaagtagacaatcaagttacagatgcaactaatccaaaagaaccagtaaatgtgtcaaaagaagaacttaaaaataatcctgagaaattaaaagaattagttagaaatgatagcaatacagatcgttcaactaaaccagttgctacagctccaacaagtgttgcaccaaaacgtgtaaacgcaaaaatacgctttgcagttgcacaaccagcagcagttgcttcaaacaatgttaatgatttaattacagtgacgaaacagatgattactgaaggtattaaagatgatggtgttattcaagcacatgacggtgaacatattatttatacatccgattttaaaattgataatgctgtaaaagctggggatacaatgacagtaaagtatgataagcatacaattccttcagatattacggatgatttcacaccagttgatattacagatccatcaggtgaagtaatagcgaagggaacatttgatttaaatacgaaaacaattacttacaaatttactgattatgttgatagatatgagaatgtcaatgcaaaattagaactaaactcatatattgataagaaagaagtcccaaatgaaacaaatttaaatttaacatttgctacagcagataaagaaactagtaaaaatgttaaagttgaatatcaaaaacctattgtaaaagatgagtcaaatattcaatctatatttagccatttagatactactaagcatgaggtagaacagactatttatgtgaatccattaaaattaaatgctaaaaacacaaatgttactataaaaagtggtggtgtagcagataatggtgattattatactggagacggtagtactataattgatagtaatacggaaattaaagtctataaagttgcatcgggtcaacaattacctcaaagtaataaaatttatgattatagtcaatatgaagatgttaccaattcagtaactattaataaaaattatggtactaacatggctaatattaattttggtgacattgattctgcatatatagttaaagttgttagtaaatatacaccgggtgctgaggatgacttagcagttcaacagggtgtaagaatgactacaacaaataaatataattattcatcatatgcaggttacactaatactattttatcaactactgactctggtggtggtgacggtactgttaaacctgacgaaaagttatacaaaattggtgactatgtatgggaagacgttgataaagacggtgttcaaggtacagattcaaaagaaaagccaatggcaaacgttttagttacattaacttacccggacggtactacaaaatcagtaagaacagatgctaacggtcattatgaattcggtggtttgaaagacggagaaacttatactgttaaattcgaaacgccagctggatatcttccaacaaaagaaaatggaacaactgatggtgaaaaagactcaaatggtagttctgtaactgttaaaattaatggtaaagatgatatgtctttagacactggtttttataaagaacctaaatataatcttggtgactatgtatgggaagatacgaataaagatggtatccaagatgctaatgaacctggtatcaaagatgttaaggttacattaaaagatagtactggaaaagttattggtacaactactactgatgcctcgggtaaatataaatttacagatttagataatggtaactatacagtagaatttgaaacaccagcaggttacacgccaacggttaaaaacactacagctgaagataaagattctaatggtttaacaacaacaggtgttattaaagatgcagataattggacattagacagtggtttctataaaacaccaaaatatagtttaggtgattatgtttggtacgacagtaataaagacggcaaacaagattcaactgaaaagggtattaaagatgtgacagttacattgcaaaacgaaaaaggcgaagtaattggaacaactaaaacagatgaaaatggtaaatatcgtttcgataatttagatagcggtaaatacaaagttatttttgaaaagcctgctggcttaacacaaacaggtacaaatacaactgaagatgataaagatgcagatggtggcgaagttgacgtaacaattacggatcatgatgatttcacacttgataatggatacttcgaagaagatacatcagacagtgactcagactcagattcagacagcgattcagattcagacagtgattcagactcagacagcgactcagactcagacagcgactcagactcagacagcgactcagactcagacagtgattcagactcagacagtgactcagactcagacagtgattcagattcagacagcgattcagattcagatagcgactcagattcagacagcgattcagattcagacagtgattcagactcagacagcgactcagattcagacagtgattcagactcagatagcgactcagactcagatagcgattcagattcagacagcgactcagactcagacagtgactcagattcagatagcgactcagactcagacagtgactcagactcagatagcgactcagattcagacagtgactcagactcagatagcgattcagattcagatagcgactcagattcggatagcgactcagattcagatgcaggaaaacatacacctgtgaaaccaatgagtgctactaaagaccatcacaataaagccaaagcattaccagaaacaggtagtgaaaataacggctcaaataacgcaacgttatttggtggattattcgcagcattaggttcattattgttattcggtcgtcgcaaaaaacaaaacaaataatacaatttgacccaggtccttgtggcctggtttttttatgattacacatgcaatagatgtatttttcatataaaataaacaataaagatacggaataaaacttatatgaggcgataatatgaattacattttaggaacaattttagaaagtaaaattacaggtgtagaaaaagcacaaataaatagactgaagttgttcaaacaacacggcatatcttcaaaatgtgtatatgttaaatggaatccttattcatacacatatgcgaagcaacatcagattgaaaatgatctgtttacaatgtatgactattttcaaaaagcaatcaattataaaaagacaaagcaagttaactggatacagtattgggaaaagtcatgtaggtacacgttgaaatttgtggaaaattcaaatgatgtcagaatatatgatgaagagcaatttataatgtatgctcattttttagataaacagtatcatcaattaaactatgtgaattattttgatcataaaagaagaaaagtaaaacgtgaattgtatgatggaagaggctttttaagttgttctcgaattttaggtgaaggacaacggattgtactcgaaaattactatacacctaatggggaaatcgtcatccaaaaatatttcgacgatataaaagggaaaaacacgctcacaaaggttatcttaaatgaagaccagcatcaacaattttttgatacagaagatgaattagttcaatattttctccatcaattatgtaaaaataatgatcaaatcatattagaccgtcctcatgaattaggaaatgttattgcgggattaaatcaaagtattccagttattgttgtgctccacagtacacatttatccggcaccggtaatgatataaaaaatttttataaaacagtgtttaataatttaacacgttataaagcgattgttgtatcaacagaaaagcaatgccaagatatttcacaatatattgaaaataaaataccagttatcaatattccggttggctacgtggcaaacttaaagtatcaatttgacatcaatcaaaaggataaaaatcatatcatatcaattgctcgcctcgttgaaaacaaacaaattacacatcaaattgaagtgatcaagcaattagtaaccaaacatcccaaaattcaattgaatatttatggacatggaaatggtttgtcagaatatcgacaacttgtagaaggttatcatttatcggaacatgttaaatttcatggttttaagacgcatattaatgaagagattgctaaagcagaactgatgttatcgacaagtaaaatggaaggttttggcttagcaattttagagtcgctttcagtaggtacaccagtgatcagttatgatgtagattatgggccatcagaactgattcaagatggatttaatggctatttagtacctccaggtgacatcaatcaaatggttgaaaaggttgaccaattattaaataatagccaaatgatgcaacaattttcaattaatagcatagaatctgcacaacagtacaatgcaactactatcagtacaaagtggcaaaaaattttaaactaagtcaaaagaaaaaagcattttcctaaaatcatctatttaacaatccacgttcataagaattgacaagtttgattaaatgacataggaaaatgcttttttttataaaaataaaggtaaagtacatttatattagacgaacaaattggtcccattgtttaattaacgacgctttactatattgttgcgcttttgccaaactaccttttgacagtcgttgttgtacttcaggatgatcaatcacatattttactttatcaaatagggcatcttcatcatttttagtaattaaataaccattgaaatctgaagtaattaattcaccaggaccatatttaatatcataactaataactggaacaccatgtgctaaagattcaagtagcgctaacgagaaaccttccatgttactcgttattaaacttaagtaagcatcgctgtattcttggtctagattgcttaaaaagccacgtaaataaacatgattttccaatccgtatttttgtatcaattcatttaattttttactttcagaaccaaaaccatacatatgaagttctactttcggtacataagggactaagcgtttaactaattcaatttgttgatgtaattgtttttcaggtgaataacgagcaacggaaattaatttaacactgtgctgatctaatgtttggactggtgtatcaattgtttcactatagccgacaggaatattaacaactggaatagtatggttaatacgtttttcaacatctaatttttgctgctcagtagaaacgataatggcacgatatcgagataaattttcaaacatcgctttatagacatttttaaatggcgatgaatctaatgcatcaatatttttaatgtgtgtactgtgaagcacagctactactgggattgactcaggtgttaagttgaaaataggtgctgtatacacattacggtcactgaaaaataaatccccatgttgatatagttgtttaatgaaaaatgcgcctaattccgtttcattattaaagaaatattgtttgttagcatagtaaacaataattttttgtacttctggtttgccatctttgtaagaaaaatacttttctaattttgtgtcaccttctggattatagaaaaattcacataatgtttgttgtttatcaacaagaatcctactacaacttaaaaagccacgcacatcataaaaatcacgttttacttttcgtctttgactatcaaaatgattcacataatctaatatacgatatttaggatcttgaaaatgggcatacattaagaaacgctcttgatcatatattctaaagtcatgactattttcaacatgttttaaagtataatgacattcatcagtccaatatgacaaccagtcaaatggttcattgcgttctaaatatgttgcttcttggaagaaatcatacatattgatatagtcagagctagtaatataattttgggcatttctatataaatatctattccatgacagaaatacacattgtgctggtcttcccatttctttaaataaatttaaacgattaataattgctttttctatcccagttaaattaacacctaaactattacctacaaaataattcatttacaacaccacttatatctattttttataattatatcacataatatttaattacttcttttaactagaagatgtgtttatttataaaacaacaaatttttatatttataatggtagtagttattcagtcaaatactaccaatatatcattgtagagcttaggatattgatttatgactcaggcacatcaaatgagaagatttataaaagagatatacaactctaggaggtataataaaaacgcgcaactactgttacgcgtttgaattaatcatatgatattatttgcgatactttaatttagcgaaagcatcatgttgatggatagactcttcgttacgacattcgatatcgaaaccttctaaccaatcaaattcaactaagtccgcggcaattaaacgaattaagtcttcgacaaagcgtggattttcatatgcacgctctgtcacacgtttttcatcaggacgttttaaaatagggtatagaattgaacttgcattagcttccattgcatctaaaattttgtttttatagtcatcaactatgtcttgatctttattaatatatgttttaacagtgacaacaccacgttggttgtgcgctgaatattcacttatttcttttgaacaagggcatagcgttgtgacagttgcttcaatagtaagttctttacgtgtaactttatcaccgtcaattgctaatccataagtgacatcggcattaccaactgctttaatatttgtggttggactatagcgatcaaagaaccatttcccagaaacatcaacgcctgccgcattttgtttcatattcgtttgtaaagtgcataacacctgataaagtgtattaaattcaagttcaataccattatcatagtgcttttcaacactttcaataatacggctcatattaatacctttttcgtcttttgttaaacttgttgaaaaactaaatgtgccagctgtttgatactggtcaacaagtacagggtacactaagtttttaataccaacttcttctatttcaaataagaaatctttatgtgtactttgtaaatctgtcatttcgttcttagtagtaggtttcgtgccttcaataggatctacggaaccaaagtgtttccaacgaccttctcgtgtcgataaatcaaattcagtcatttttttcctccgttaagatttaaagtgatatgtccaatatggttcgactgttaaaaagctgtgttgtttaccatcgatttcaggacttgctaattgttttaaaaatggacctgtttgagaagcatgtgcttcaaatgccttaattttaagttctttaaaatctgtaatatcattttggatatcaggttctccaagtgcttcggttgcatcattactgaacgcaactaaagttaaacgagggcgttcttctttaggtatgcgttcaaccgttcgaattacagcgtctgctgttgcttcgtggtcaggatgtactgcatatccaggataaaatgaaataatcaatgatggatttgtatcatcgattaaagatttaatcataccatctatatgttcatagggttcaaattcgacagttttgtcacgtaaacccatttttcttaaatcagtaataccaataactttacaagcttcttctagttcacgctcacgaatacttggtaatgattcgcgtgttgcaaatgggggattacctaaatttctgcccatttgtcctagggttaaacatgcatatgttacaggtgtgcctttttggatataacttgctaatgtgcctgcagatgagaaggtttcatcatcaggatgtggaaatattactaatacatgtctttcgtcagtcatgttgatgcctcctctataaattaaatggtcgctcactaatttgaagtgctgcagcgagttgaccttcgtaattaaaacctgcaattaaaaattcatcatgctcattgatttcaaaatgcgttagaccttgtacataaacccaaccaccatttgatagtttaagaccaatgcgataaggttctttatcaccaccttttagttgtgcatgtgtatatgttacttgtatgtttcttaaaaaagtaccagcattaaaaacacgttgatcgaaatggttcgcataggccccatttgtcgtttcaacatgcagatacacaggtttatgttcaaaagaagcaagtaaatctataacttcttgttctttaattggttccaacacgttcactccttacactatcaatgtgtttatctttctattttactaaaaactattcaataattgtatacgattgctcaattatttataaattaattttcatgaagctgaatgactcaggattacgcaatcatacagcattagttttttacttttaaaaatcaaaaaaattgttggaatttgaaaagtgttaaacattaaaaatgatgctatattaatggtgtatgaatgaattcataagtttttaaaatgtattaaatttgtggaggcatgtaaacaatgaaagtattaaacttaggttcaaaaaaacaagcatcattctatgttgcatgtgagttatataaagagatggcatttaatcagcactgtaaacttggtttagcaactggcggcacaatgacagatttgtatgagcaacttgttaagttattaaataaaaatcagttaaacgtagacaatgtatccacgtttaatttagacgaatatgtaggtttaaccgcatcacatccgcaaagttatcactattatatggatgacatgcttttcaaacaatacccttattttaatagaaagaacattcatattccgaatggagatgcctatgatatgaatgcggaagcgtcaacatataatgacgttttagaacaacaaggtcaacgtgatattcaaattttaggtattggtgaaaatggtcatattggatttaatgaacctggtacgccgtttgatagcgttactcatatcgttgatttgactgaaagtactattaaggctaatagtcgatattttgaaaacgaagatgatgttccaaagcaagccatttcgatgggacttgctaatattcttcaagctaaacgtatcattttactcgcatttggtgaaaagaaacgtgctgctattacacatttattaaatcaggaaatttctgttgatgttccagccacattacttcacaaacacccgaatgttgagatatatttagacgacgaagcttgcccgaaaaacgttgcgaaaattcatgtcgatgaaatggattgattgcaatgtttaattaagaaatgcctcgggaaaggttccaatagaaagataaaaagcattggaaggatgatttttagtggaattacaattagcaattgatttattaaacaaagaagacgcggctgagttagcaaataaagtaaaagattatgtagatatcgtagaaatcggtacgccaatcatttacaacgaaggtttaccagcagttaaacatatggcagacaacattagtaatgtaaaagtattagcagacatgaaaattatggatgcagctgattatgaagttagccaagcaattaaatttggcgcggatgtaattacaatactaggtgttgcagaagatgcatcaattaaagcagctattgaagaagctcataaaaataataaacaattactagttgatatgattgctgttcaagatttagaaaaacgtgcaaaagaactagatgaaatgggtgctgattatattgcagtacacactggttatgatttacaagcagaagggcaatcaccattagaaagtttaagaaccgttaaatctgttattaaaaattctaaagttgcagtagcaggtggaattaaaccagatacaattaaagaaattgtcgctgaaagtcctgatcttgttattgttggtggcggaatcgcaaatgcagatgatccagtagaagctgcaaaacaatgtcgcgctgcaatcgaaggtaagtaatatggctaaatttagtgactatcaattaattctagatgaattaaagatgactttgtcacatgttgaagcggatgagttttcaacgtttgcgtccaaaatactacatgctgaacatatatttgtagctggcaaaggacgttcaggattcgtggcgaatagttttgcaatgcgcttaaatcagctcggcaaacaggcacatgttgttggagaatcaacgacacctgcgattaagtcgaatgatgtatttgtaattatctctggttcaggttccacggaacatttaagattattagcagataaagcaaaatcagtaggtgctgacatcgtattaattactacaaataaagattctgcaataggcaatctagctgggacgaacatcgttttgcctgcaggtacaaaatatgatgaacatggttctgcacaaccgttaggaagtttgtttgaacaagcatctcaactatttttagatagcgttgtaatgggattgatgactgaaatgaatgtttcagaacaaacgatgcaacaaaatcatgctaatttagaataaaacaaagatagtcgataatatgatgcctaggcagaaatattatcgattatttttttatttaaataataaattatagtataatatcaataataaacgaataggggtgttaatattgaagtttgaaaattatatttttgattttgatggtacgttggcagacacgaaaaaatgtggtgaagtagcaacacaaagtgcatttaaagcatgtggtttaacagaaccatcagctcaagacatatcgcattatatgggaatacctattgaagaatcatttttaaaattagcagaccgaccattagatgaagcaacattagcaaagttaatcgatacatttagacatacatatcaatctattgaaaaggactatatttatgaatttgcgggtataactgaagccattacaagtttgtataaccaagggaaaaaacttttcgtggtgtctagtaagaagagtgatgtattagaaagaaatttatcggctatagggttaaatcatttaatcactgaagctgttggatccgatcaagtaagtgcatataaaccaaatcctgaaggcatacacacaattgtgcaacgctacaatttaaatagccaacaaacggtttatattggtgattcaacatttgatgttgagatggcgcaacatgctggtgtaccatctgcagcagtaacatggggagcacatgatgcaaggtcattacttcattcaaatccagattttataatcaatgatccatcagaaattaataccgtattataaaatttgttaaaacagagaataccatggttaaaatccatatttataaatattagattatacatagaaatatttcgctttagattaggaatttaaaataaatatttattaataatcgtgtatgtttaaatagaaaagtctgcgtaattaattatttgatattaatacaaataactccgactgatgacatattacttgcagtcaattgaatatcttactttaaatacgatgtcgaaaatggcgatagcatatgacttatatgaagttgtatgctatcgctatttttagttataattccaaaaagttaatcgttcgatgatttaagaattattattgtttaattcaaatgtacgagggtataaaatcattgaatttaattcgataaagtgaaatttttgaacaaacatacttttgtatttatataaaagtttaaattcttataaatttgacaaaactaattaactccgtataattatgaaacatacaagagggagtgtatgaattcatggattttaataaagagaatattaacatggtggatgcaaagaaagctaaaaagactgttgttgcaaccggtatcggtaatgcaatggaatggttcgattttggtgtctatgcatatacaactgcgtacattggagcgaacttcttctctccagtagagagtgcagacattcgacaaatgttgactttcgcagcattagccattgcgtttttattaagaccaattggtggtgttgtatttggtattattggtgacaaatatggacgtaaagttgtattaacatcaacaattattttaatggcattttcaacattaaccattggattattaccaagttatgatcaaattggactttgggcaccaatactattattacttgcacgagtactacaaggattttcaacaggtggagagtatgcgggggcaatgacatatgtagccgaatcatctccagataagcgtcgtaactcattaggtagtggattagaaatagggacattatcaggttatatagctgcgtcaattatgattgccttactcactttcttcttaactgatgaacaaatggcatcatttggttggagaatcccattcttacttggtttattcctaggattattcggcttatatttacgtcgtaagcttgaagaatcaccagttttcgaaaatgatgttgcaacacaaccagaacgagacaacattaactttttacaaatcatcagattttattacaaagatatatttgtgtgttttgtagctgttgtattcttcaatgttacgaactatatggtaaccgcatacttaccaacttacttagaacaagttattaaactagatgcaacgacaactagtgtattaattacttgtgtcatggcaataatgattccattagcattaatgtttggtaagttagcggataaaataggtgaaaagaaagtatttctaatcggtactggcgggttaacattatttagtatcatcgcatttatgttattacattcacaatcatttgttgtgatagtcatcggtatatttggattaggattcttcttatcaacatacgaagcgacaatgccagggtctttaccaacaatgttttacagtcatataagatatcgaactttatcggtaacctttaatatctctgtttcaatatttggtggtacgacgccattagttgcaacatggttagtcgcgaaaactggtgatccattagcacctgcgtattatttaacagcaatcagtgttattgggtttttagtgatcacattcttacatttgagcacagcaggaaaatctctcaaaggttcatatccaaatgtagataacgagcaagatagagcttattatgcagaacacccaaaagaagcattatggtgggtgaaagaacgtaaagattagagatttcagtaaataagtaataatcaatcgtataaaagcactttaaagctagtaaacgctactaactttaaagtgctttttaaattagggaatgtaattagccgaaataaagtttttgtatatacataaacccccactgcaatgattatcgcaatgggggaaagaggggacttaaagcatatgtttagctttgaatacttaaaattctcttgctattgaaatgttaggatgtaaatatgtcttagagtattttgtccaacgcaattaatattgagactctaaccttcaatattattatagagaacacaaacttaaatagattgggtgacttatttgtgtcagttattgcgattgcgataacttcttttctctatatacatatagtatcgtcttatctaataaaaaacatggtactacagtatcaaatttatctagggcttaagtttgatttttataataggcaggtttacctgataaaaatacttattcattatataatgttaacaagatgtattataaagtttacattgagtgagggatattgatggacgtaattttagaacagttggaaacacatactcaaaataagcctaatgacatagcattacatatagatgatgaaacaattacatatagtcaactaaatgcccgcatcactagcgcagttgaatctttgcagaaatattcacttaaccctgttgttgctattaatatgaaatcaccggttcaaagtattatttgttatttagctttgcatcgtttacataaagtgcctatgatgatggaaggtaaatggcaaagtactatacatcgtcaattgattgaaaaatatggtattaaagatgtaattggagatacatgtctcatgcagaatatagactcacctatgtttattgattcaacgcaattacagcactaccccaatttattacatattggttttacttcagggacaactggactgccaaaagcatattatcgtgatgaagattcatggttggcttcttttgaagttaatgaaatgttgatgttaaaaaatgaaaatgcaatagcagcccccggaccactatcgcactcgttaacattatatgcgttattgtttgctttaagttccggtcgtacttttataggacagaccacttttcatcctgaaaggttacttaatcaatgtcgtaaaatatcatcatacaaagttgctatgtttcttgttccaacgatgattaaatcattattgttagtttataacaatgaacatacaatccaatcattttttagcagtggggataagctgcattcttctatttttaaaaagataaaaaatcaagcaaatgacataaatttgattgaattttttggtacatcggaaaccagttttatcagctataacttgaatcagcaagcaccagttgaatctgtaggtgtgctatttccaaatgtggaattgaaaacaacgaatcacgatcacaatggtataggaactatttgtgtaaaaagtaatatgatgtttagtggctatgtaagcgaacaatgtataaataatgatgaatggtttgttactaatgataatggctatgtaaaagagcagtatttatatttaacgggacgacaacatgatatgttaattattggtggtcaaaatatatatccagcacatgttgaaagccttttaacgcaatcgtcgagcattgatgaagcaattatcatcggtattccaaatgagcgttttggtcaaataggtgtattgctttattctggtgatgtgacacttacacataaaaatgtaaaacaatttttaaataagaaagtgaaacgctatgaaattccatcgatgattcatcatgtagaaaagatgtattacactgcaagtggtaaaattgctagagaaaaaatgatgtcgatgtatttgagaggtgaattataatatgaatcaagcagtcatagttgcagctaaacgaactgcatttgggaaatatggtggcactttaaaacatttagagccagaacaattgctcaaacctttattccaacattttaaagagaagtatccagaggtaatatctaaaatagatgatgtagttttaggtaatgttgttgggaatggtggcaatattgcaagaaaagcattgcttgaagcggggctcaaagattcaatacctggcgtcacaatcgatcggcaatgtgggtctggacttgaaagtgttcaatatgcatgtcgcatgattcaagccggagctggcaaggtatatattgcaggcggtgttgaaagtacaagtcgagcaccttggaaaatcaaacgaccgcattctgtgtacgaaaccgcattacctgagttttatgagcgtgcatcatttgcacctgaaatgagcgacccatcaatgattcaaggtgctgaaaatgtagccaagatgtatggtgtttcaagagaattacaagatgaatttgcttaccgaagtcatcaactgacagcggaaaatgtaaagaatggaaatatttctcaggaaatattacctataaccgttaaaggagaactattcaacactgatgaaagtctaaaatcacatattccgaaagataactttggccgatttaagcccgtaatcaaaggtgggaccgttaccgctgcgaatagttgtatgaaaaatgatggtgcagttctattgcttattatggaaaaagatatggcatacgaattaggtttcgatcatggtttattatttaaagatggtgttacggtaggtgttgattctaatttacctggcattggtccagtaccagccatttccaacttactaaaaagaaatcaattaacgatagaaaatattgaagtcattgaaattaacgaagcgttcagtgcacaggtggttgcctgccaacaagctttaaatatttcaaatacgcaattaaatatatggggtggtgcattagcatcaggtcatccatacggtgcaagcggtgcccaattagtgacgcgattattttatatgtttgacaaagagagtatgattgcatctatggggattgggggaggtctaggaaatgcagcattatttactcgattctaaccagcgattaaatgtgtcattttctaaggatagtgtggctgcatattatcattgttttaaccaaccttatagtaaagaagtaccaccattaatgtgtgcgtcattatggtcaaaatttgatttatttaaaaaatatgcaaatagcgaactgattttaacaaaatcagtaattaatcaaactcaaaagataaaagtagacacaatatatgtaggacatttagaagatattgaatgccgacagattcgcaatatcacacgttatacaatggctttaacattaactaaaaatgatcaacatgtcataacggttacacaaacttttattaaggcgatgaagtagagatgaagtttaatgagatatggataaatgaatatttggcgctcgtaaatgatgataatccaatacataatgagattgtgccaggacaattagtgagtcaaatgatgttgatggctatgtcattagaggcgaaccagtgtcaaattaactatgttaaacctattttaataaatgaaaatatcaaattcattgaagaacacgagcaagaaattatagcaattaatgacgatggagagattaaaataaagatttctttgagcacaaaaaaataaccgatattagctgcatgaacgcatattaattaggagatgaaaggacagctaatatcagttatgtattgttattattattgggaacagagataaatataggttacgtttctttctttgcacggggatgcattaatctaaaataataataacaactatatcaatgtttaataaattctggattattggaacgattagtcaatttaactaactttcatatgatctatatcgtcctgtaataaagagagcaatttgaatatttcagtatcactaaatgaatcgtcacatttaattgaaacatgctgaaacgttttggttataatttcataaactggtgcgccttcatgttgatactgtcgataaataatcataacctatattacctcctttgctactctatggttatattataaataacatttttatgtgtgacatcaaccttaagtatcaactttttatcagacatagaacgtataatttactaagactatttatgtatcatgttttaaaaggaatatatttttataaagtcgttgagaagttatttttaatttcaaaaaaatggcagaattagtagagcgggataaaacattatgtttaaacaagggcataataaagttccgaaaggatttgtttttttaggataactgattcgtgacactgtaaatgaatattatatacatatgttgaaataaaactatctataacgatttcttacaaaacttatttgcacaatttaactgtgaaaatcaaacaagtatttaataactaaaataaccacaccgaaagtgactttattgtgtactgagccccaaagttagactcaaaaagctaactttacaggcgcacagcaatgacaatcaaatcataaggtgtggttaatctattttttatgaacgaagcattaaacctctgttacttcaacatcgatatgttcaatacggttgtatgcaccgtgatccacaggaccaacaaaatcattcattttccaaccgtttttaatagcagaagcgacgaaagctttcgcgctaatcacagcttctttcggtgacttaccgttagctaaatatgcagttgttgccgcagcaaatgtacaaccagcaccatggttataactttgttggaacatgtctgtagttagttgataaaatgtttgaccatcatagtataagtcatacgatttatcttgatctaaagctttgccacctttaatgatgacatgctgtgcgcctttatcaaagataattgttgcagcctttttcatatcttcaattgaatttaatttacctaatcctgataattgacccgcttcaaataagtttggcgtcactaccgttgctttaggtagtaaatatttaatcatcgcctcagtatttccagggttaagcacttcatcttcgcctttacaaaccatgacaggatctactacaaaatattgtgcattagatgcctcatatacttctccagcacgtttgattatctcctcagtacctaacatacctgttttaatagcatcaggtccgattgataaagccgtttcaagttgcttttcaaatacgtccataggtaatggtgtgacatcgtgtgaccatgtatctttatccatagtaacgatggcagttaaagcgaccatgccatacgtatctaattcttggaacgttttcaaatctgcttgcatacctgcgccagcacttgtgtcagaaccggcaattgttaaaactttctttaaagccattgagcttcactcctacataataatattgtattcatcatatcatttttaacctaattgaaaaatattaagcattcaatatttgatgattgttgaaatgaatcattcatactattgtaacttttgaaaatgtcattcactttagataagtgtgatatgttaaaatatgtcctgaggtgagattgaatggaatggtcgcaaatttttcatgacataacaacgaaacatgactttaaagctatgcatgattttttagaaaaagaatattcgactgcaatcgtataccctgatagggaaaatatttatcaagcgtttgatttaacaccgtttgaaaatatcaaagttgttatattaggacaagacccgtatcatggtccgaaccaagcacatggattagcattttcagtgcaacctaacgcaaaattccctccatctttacgtaatatgtataaagaattagcagatgatattggatgtgttagacaaacaccacatttacaagattgggcaagagaaggtgtcttgttattgaatacagttttaaccgtaagacagggtgaagcaaattctcatcgtgatattggttgggaaacatttactgatgaaattattaaagcagtgtctgattataaagaacatgttgtctttattttgtgggggaaacctgcacagcaaaaaataaagcttatcgatacatctaaacattgtattataaaatcagtgcatcctagtccactgtctgcatatagaggattctttggatcaaaaccgtattccaaagcgaatacctatttagagtcagtaggaaaatcaccaattaattggtgtgaaagtgaggcgtagatggtgaatagagaaactttaatagcacgaattgagcaagaattagtacaagcagagcaggcgcagcatgaccatgactttgaaaaacatatgtatgccatacatatattaacatctttatatgcttcaacatcaaatacaccacatattggtgaacaacaaatgaatcatcgtattgctaaccataatcaaatggcacattcacaaattacgcagccaacacatcaagtgacagctgctgaaattgaagcgatgggtggtaaagtaaatacgcattcagcacatcatcataataagtcatattcacaaccttcaaaccaacaacaaagattagcgacagatgatgacattggcaatggtgaatccatatttgatttttaaaaagcaacaatgaaacataattacttaatagcttgttaagtatgtaggttaataatcaagacgcatatacttttattcgagtgttcggatttaaacatttattaatactgaattatataaggagaggtagcaatgaaattatttattattttaggtgcattaaacgcgatgatggctgtcggaacaggtgcatttggtgcacatggtttacaaggaaaaataagtgatcactatttatcagtatgggaaaaagcaacgacgtatcaaatgtaccatggcttagcattattaattataggtgtaattagtggtacaacttcaatcaatgttaactgggctggctggttaatatttgctggtattattttctttagtggatcattatatattttagtattaactcaaattaaagttttaggtgcgattacgccaattggtggcgtattgttcatcattggatggataatgttaatcattgcgacattcaaatttgctggttaaattttaaaactttagattacctatgtaactaaacattaaatttttaataaaaataatcaagaaaaagagttacaaactcatcttttgggtatagaataccttcgaggtgagtttttatttatggaaaaaaagaataagcaaatagatagaggcgatttaaaacaaaacctatctgaaaagtttgtatgggcgattgcatatggttcatgtatcggatggggcgcattcatcttaccaggagactggattaagcagtcaggtccgattgcagcatcaattggtattgttattggtgcattattaatgatattaattgcggttagttatggcgcattagtagagagatttccagtatcagggggcgcgtttgcctttagtttcttaagtttcggcagatatgtgagtttcttctcatcatggtttttaacttttggttatgtctgtgttgttgctttaaatgcgacagcattcagtttactagttaaattcttattgccagatgtcttaaataatgggaaactatacaccattgcgggctgggacgtttatattacggaaatcattattgcgaccgtattactacttgtattcatgctagtaacgattcgtggcgcaagtgtatctggatcattacaatattatttctgtgtggcgatggtaatcgtcgtattattgatgttctttggttcattctttggtaataattttgcacttgaaaatttacaaccgttagctgaacctagcaaaggatggttagtgtctattgtggttattgtatccgtggcaccatgggcatatgttggatttgataatattccacaaacagcagaagagtttaactttgcaccaaacaagacatttaagcttatcgtgtacagtttattagcagcatcattaacttatgttgtcatgattttatacactggttggttatcaacaagtcatcaaagtttaaatggacaattgtggttaacaggtgctgttacacaaacagcatttggttatattggattaggtgtattagcaattgcaattatgatgggtatatttactggtttaaatggattcttgatgagttcaagtcgcttgttattttctatgggacgttcaggtataatgccaacaatgtttagtaaattacatagtaaatacaaaacaccatatgtcgcaatcatattcttagtaagtgtgtctttaattgcaccttggctaggaagaacggcattgacttggatcgtagatatgtcatctacaggtgtatccattgcctactttattacatgtttgtctgctgcgaaattattcagttataacaaacaaagtaatacgtatgcaccggtttacaaaacgtttgctattattggctcatttgtatcattcattttcttagcgttgttattagtgccaggttctcctgcagcactgactgcaccatcttatattgcattacttggatggttaatcatcggtttaatattctttgtgattcgatatcctaaattgaaaaatatggataatgatgaattaagtcgcttgattttaaatagaagtgaaaatgaagttgatgatatgattgaagaacctgaaaaagaaaaaactaaataataaaagaatcgcacaatataccttcttaatttgaaggcgtatcgtgcgattttttgtatcataaattgacatttaagacgaggcagttgaaccttatataaaattgccaagagttaaggctgaggcatttctaacaaatatttataatcgtttaaaagatttcacgaatccagaaacaattaatttggaaatttggtcggcgaataataaacctaatgcgatagctcctgcaataagtgtaacctctagcatggtattgattgctgtactgaaatttaataatactaaatttttcgttgcatcgtaagctaatccacctggcactaacgggatgatacctgtcaccataaaaatgattgcaggttctttttgtttacgagccatatagtgacttaataaacctagggcaagactgccgaagaaactagagtatatagtgtgcacattaaagccgttgaagaataaggtgtaaaccatccatccacacgtaccaacgaaaccacatgataaatataattttctaggtgcatcaaaaatgacgcagaagaacattgaagctaaaaagctaaagataaagtttaatatccaaaacatagtctgatactcctatactaaaattaatacgctaccaacgccagcaccgatgccaaacgcagtaaccaatgcttctaatgatttcgttgtgaacatcaacatgtgcccaccaaataaatcttgtattgcgtttgttattaatacaccaggaacaataggcatgactgccgcaatgataatagttgccaagtcacctgttggaataagtgtatgtccaataacggcgataatcccaataactaatgaaccaatgaattctgggataaactgtgcgtgtaacttacgatctaaaatctcagtgactaggtatcctagactacctgctaatatcgcagttaaaacatcaatcaatctaccaccttgtaaatataagaaactcattgcaatcattgctgcagcaaaacctttaaagggaagactgctgtcacgcttggcaacatatattttttcaagttgtgtttttgcctcggctaaagaaatttcattatttgtaatttgacgcgaaattttattagcttgagaaatttttattaagtttgtatctcgagaggtaattctaaatattctaggaaacgattccgaatgtaacgtaaactggatgacagtgtttgtaacaaagctgttactttcactgtaaccaagtttttttgcaatacgtgtcatggtatcttctacacgcgtaccttctgcaccagattctaatagtatgcgagcagcaagcatgacaacatctttgataagtacctcttgtttgtattcttctgaatttatgtccatttcatcaccattgtttataagaatttaatactcattatagtttatacactataaaataaccacatgagctttttgataagttgttattgattttaaaaaactaatatttgatactattgtaataataatcatcggaatttttagtagttaaaattctcttgaagtataaaaaggaaaaaatattgaaaaaaattcgacaaaaatatgtttcaaatatttcaaataggttaaaataatattagttaaccattacaaaaattgtatagagtagcgactgtataatttctattgaggttaacgtttatatgtagtgatagtagttaaagttctcccaaggaagactactcgggtacactttgctatgagcaaagtgtactttgttattgatattacattagcacatatatataagtttaaacatacagatttcaactatttaccaaatcacgtcttatgtatacgggaatatactgaagataaacgaaaaattccaagcttaaaccgataagcttggaattttttattaatttataaacgtaccaatgtattaagaaatcgcaaagaattgattgaattcgtttgtgttaataatatgtcctacaaagaaactaccgaattcaccgtatcgtgctgttgtttcatcaaagcgcatttcgtatacaatttttttgaattgtaatacgtcgtctgagaacaatgttacgccccattcgaaatcatcaaaacctacagaaccagtaataaattgtttgattttgccagcatattttctaccaatcataccatggtcatacattaatttttggcgttcttccatagttaacatgtaccagttataagtttcattacgacgtttgttcattggatagaaacaaatataatcagaatgtggtaattctgggtataatcttgctttgatatgagggttctcataaggatcttcatcagatttaccagctaaataattgctcaattcaatgactgatacatatgaatatgtagggattaagaagtcagcaatgcgcaatttgttaaattcattttcaatatgatttaaagacttcatttcaggacgtaagaaccataataacaaatctgctttttgaccagttatattataaatagcttgatcaccagattttgatgatcttacagttgctgtattttctaaaaatgattgaaattcagtgacaagtgcatcgcgttcgtcctttggaactagacgtaatgatgcccaatcaactgcataaaataaatgtagactataccaaccatctaatgtttcggctgcttgactcatgtttatcgctccttttcaaaaatcatcagttctttataaattttatcataaagcaaaggggtaacgataaaattatgattacaaattggtgacgtggcattatgaaataaaatggcgtataattataccgtgaatgattaataagatttatattacaggaggacattatggctgatttattaaatgtattaaaagacaaactttctggtaaaaacgttaaaatcgtattacctgaaggagaggacgagcgtgttctaacagctgcaacacaattacaagcaacagattatgttacaccaatcgtgttaggtgatgagactaaggttcaatctttagcgcaaaaacttaatcttgatatttctaatattgaattaattaatcctgcgacaagtgaattgaaagctgaattagttcaatcatttgttgaacgacgtaaaggtaaagcgactgaagaacaagcacaagaattattaaacaatgtgaactacttcggtacaatgcttgtttatgctggtaaagcagatggtttagttagtggtgcagcacattcaacaggcgacactgtgcgtccagctttacaaatcatcaaaacgaaaccaggtgtatcaagaacatcaggtatcttctttatgattaaaggtgatgaacagtacatctttggtgattgtgcaatcaatccagaacttgattcacaaggacttgcagaaattgcagtagaaagtgcaaaatcagcattaagctttggcatggatccaaaagttgcaatgttaagcttttcaacaaaagggtctgctaaatcagacgatgtgacaaaagttcaagaagctgtcaaattagcacaacaaaaagctgaagaagaaaaattagaagcaatcattgatggcgaattccaatttgatgctgcgattgtaccaggtgttgctgagaaaaaagcgccaggtgctaaattacaaggtgatgcaaatgtctttgtattcccaagtttagaagctggtaatattggttacaaaattgcacaacgtttaggtggatatgatgcagttggtccagtattacaaggtttaaattctccagtaaatgacttatcacgtggctgctcaattgaagatgtatacaatctttcattcatcacagcagcgcaagccttacaataacgatggatttagcgagtaaatattttaatggcgtcaactggcgatatatcgatcattcttctggattagagcctatgcaatctttcgcattcgatgatacattttgtgaaagtgtgggcaaagatatatcagataatgttgtgcgtacttggattcatcaacatactgttattcttggtattcatgattcaagattgccgtttttaaaagatggcattgattatttaacgaatgagattggttataatgccattgttagaaattctggcggcctaggtgtcgttctagatcaaggtgtattaaatatatcgctgatgttcaaaggacaaacagaaacaacgattgatgaagcgtttactgtgatgtatctcttaattagcaaaatgttcgaagatgagaattttgatattgatacgatggaaattgaacattcttattgcccaggaaaatttgacttaagtatcgatggtaagaaatttgcaggcatatcgcaacgaagagttagaggcggtattgctgtacaaatttatctttgtgttgaaggctctggttcagaacgtgcattgatgatgcaaacattttatgaacatgctttaaaaggtgaagtgactaaatttaaataccctgaaattgaaccatcttgtatggcctcactagagacattacttaacaaaacgattactgttcaagatgtaatgtttttactattatatgcaatcaaagatcttggcggtgtattaaatatgacgccaattactcaagaagaatggcaaagatacgatacgtattttgataaaatgattgaaagaaacaagaaaatgatagaccaaatgcaatagttaaatatttaacagcccctttcaagttatcgtttggggctgttatttttgaaagtatccataaatagcataaatatgttattgacctaatatttaaattgaacatcattaaattaaaagtaatgatatgattgaaataataaatttaataaggaaatttcatgttttacgtattaaatagattgagaatagggtatatataatgcgtatgactatgaaagaaacgaccttctattgaaatgttctaatactttagtagtaaatctatatattccaattattatttgtagtattatagttagggtggaaaattataaattgtagggctattttataaaaagataaagaatctgaaatatcactcgataagatttaaactttgaagtaaacgaaagttagttttatactaatcaagttaagtcatatataaatttaaaataaagtttatacataatatgaataatgtgagataaagactgcaatgaaatttaacgcgaatgcgtatgcaacttagaatatgatgtcttttactaataaataaaaacaatgtatcaagtataggataaatataaaaggtgatattgacatgacaagaaaaggatatggggaatcgacaggtaagattattttaataggagaacatgctgttacatttggagagcctgctattgcagtaccgtttaacgcaggtaaaatcaaagttttaatagaagccttagagagcgggaactattcgtctattaaaagcgatgtttacgatggtatgttatatgatgcgcctgaccatcttaagtctttggtgaaccgttttgtagaattaaataatattacagagccgctagcagtaacgatccaaacgaatttaccaccatcacgtgggttaggatcgagtgcagctgtcgcggttgcttttgttcgtgcgagttatgattttttagggaaatcattaacgaaagaagaactcattgaaaaggctaattgggcagagcaaattgcacatggtaaaccaagtggtattgatacgcaaacgattgtatcaggcaaaccagtttggttccaaaaaggtcatgctgaaacgttgaaaacgttaagtttagacggctatatggttgttattgatactggtgtgaaaggttcaacaagacaagcagtagaagatgttcataaactttgtgaggaccctcagtacatgtcacatgtaaaacatatcggtaagttagttttacgtgcgagtgatgtgattgaacatcataaatttgaagccttagcggatatttttaatgaatgtcatgcggatttaaaggcgttgacagttagtcatgataaaatagaacaattaatgaaaattggtaaagaaaatggtgcgattgctggaaaacttactggtgctggtcgtggtggaagtatgttattgcttgccaaagatttaccaacagcgaaaaatattgtaaaagctgtagaaaaagctggtgcagcacatacatggattgagaatttaggaggttaatgcgttgattaaaagtggcaaagcacgtgcacatacgaatattgcacttattaaatattggggtaaaaaagatgaagcactaatcattccaatgaataatagcatatctgttacattagaaaaattttacactgaaacgaaagtcacttttaacgaccagttaacacaggatcaattttggttgaatggtgaaaaggttagtggcaaagaattagagaaaatttcaaaatatatggatattgtcagaaatagagctggcatcgattggtatgcagaaattgaaagcgacaattttgtaccaacagcagcaggattggcttcatcagcaagcgcatatgcagctttagcagcagcttgtaatcaagcgctagacttgcagctgtcagataaggatttatcgagattggcgcgaatcggttcgggttctgcgtcgcgtagtatttatggtggatttgcagaatgggaaaaagggtataatgatgagacgtcatatgccgttccacttgaatcgaatcattttgaagatgaccttgccatgatatttgttgtgattaatcaacattctaaaaaggtacctagtcgatatggtatgtcgttgacacgaaacacatcaagattttatcaatattggttagatcatattgatgaagatttagctgaagcaaaagcagtgattcaagacaaagattttaaacgccttggtgaagtaattgaagaaaatggtttgcgtatgcatgccacgaatctaggatcaacaccgccgttcacatatcttgtgcaagaaagttatgatgtaatggcgctcgttcacgaatgccgagaagcggggtatccgtgttattttacaatggatgcgggacctaatgtgaaaatacttgtagaaaagaaaaacaagcaacagattatagataaattattaacacagtttgataataaccaaattattgatagtgacattattgccacaggaattgaaataattgagtaaggaagagataaaatgattcaggtcaaagcacccggaaaactttatattgctggagaatatgctgtaacagaaccaggatataaatctgtacttattgcgttagatcgttttgtaactgctactattgaagaagcagaccaatataaaggtaccattcattcaaaagcattacatcataacccagttacatttagtagagatgaagatagtattgtcatttcagatccacatgcagcaaaacaattaaattatgtggtcacagctattgaaatatttgaacagtatgcgaaaagctgcgatatagcgatgaagcattttcatctgactattgatagtaatttagatgattcaaatggtcataaatatggattaggttcaagtgcagcagtacttgtatcagttataaaagtattaaatgaattttatgatatgaagttatctaatttatacatttataaactagcagtgattgcaaatatgaagttacaaagtttaagttcatgcggagatattgctgtgagtgtatatagtggatggctagcgtatagtacttttgatcatgaatgggttaagcatcaaattgaagatactacggttgaagaagttttaatcaaaaactggcctggattgcacatcgaaccattacaagcacctgaaaatatggaagtacttatcggttggactggctcaccggcgtcatcaccacactttgttagcgaagtgaaacgtttgaaatcagatccttcattttacggtgacttcttagaagattcacatcgttgtgttgaaaaacttattcatgcttttaaaacaaataacattaaaggtgtgcaaaagatggtgcgtcagaatcgtacaattattcaacgtatggataaagaagctacagttgatatagaaactgaaaagctaaaatatttgtgtgatattgctgaaaagtatcacggcgcatctaaaacatcaggcgctggtggtggagactgtggtattacaattatcaataaagatgtagataaagaaaaaatttatgatgaatggacaaaacatggtattaaaccattaaaatttaatatttatcatgggcaataaatgatttgataggggagcaatcatctaatttaattagaagataaatgctccattttttattgccagctgtgttacgtatcttgaaaaaaatattaaaaagagtaaaatagatagagttaacgaaaaaattaatgaaatcgacgatatagatatgataaagaaaggtgggtagcaatatgaaaaatacattccttatttgtgatgaatgtcaggcagtcaatataagaacgttacaaaagaagttggaaaaattagatcccgatgctgaaatcgtgataggttgtcaatcttattgtggacctggacgccgaaaaacattcgcttttgttaataaccgcccactggctgcgcttactgaagaagaattaatcgaaaaagtttctcaacaattaaagaaaccacgtgatcctgaagaagaagagcgtttaagaaaacgacatgaagaacgtaaacgtcgtaaagaagaacaagatagaaagcttaaagaaaaattagaaaagcgaaaagcacaacaataaagcctgatggcagcatcattcaatgcgtgccaccaggtttttatgttttgtctagaaattaaataaatcattaaatgattcggccatcgtaggatgcgtataaatattatctcgtaatatggtatatggaatgttttgatcaatcgcaagtttaattatattaattaattcttcagattgcttaccatataatgtagcacctaaaatcatattattttcattattaatgactactttaaataaacctcttggatcattgttaattttgtgacgaggtatagcacttactaaaagttgatgctcagtgtaatcataatgttgagcggcagcttctttgctagttaatccaacacgtgataatggtggatctataaatactgtataaggcacgctgcctctattgtcagtcgtacgtgactgattaccatataaagatgatttgataattcgataatcatctaaagatatatacgtaaattgaagtccgcctttaacatcacctgcagcataaatatgcggcacagttgtttgaagatgagcattgactttaatttcgcctctgtcgcctaattcgatatcagtattttctaatgctaaatccgtattcggtttgcgtccgatagccaaaagtactgcatcagcctcaaagttaccaacgttagtatggacagttgtatgataattgtcagatgacaattcagtcgtttcaacatttgtatgcaatgcaatgcctttattttctaagtcagtaatagcatgtgcaacgacatcttgatcttcgcgtggcataaatgattcaccacgttctaatactgtaaccttactacctaaattcgcaaacattgaagcaaattctaaggcgatataaccgccacctacaataacgaggtgcttaggttgatagctaatgtttaataaacctgttgaatcgaagacgtgtttagcttgatcaaggccttttatgttaggaatgatagaggtagcaccggtattaataatgatatgaggtgcagtaatactatcgacgatatcaccatgctgatctaataaattcacttcagtattagatttaaactgcgctttaaaatccaatacatcaatgttactgtcgtctgctaataagtggtaatttttattgtttagcgcattgacaacatcgtttttacggttataacttgcttcaaaggatttgccttctaatccatcatgtacaagtgtcttcgaaggtatacatcctacgttgatacaagtgccgccatacattttcgaagattgttcgataactgcgacgtgttgacctgttgatgcagcgtatttcgctaaagttttaccagctttcccaaatcctattacaattaaatcatatgttttcatgacataaatcctccttttgaatgtcttcaatgacatctttgattgttttttctttataaaaattaataatgttattctgttcgtcttgttgataatgtgacatggtagttgcaatattacgagcaatttgacagtgactaccttcgtcgccagtaaatagtcgtgtgtgatgttctttctctaagacaaaatgtttatataatgttgctaatgagacatcagcgctacgatcatttgctaaataaccaccatctttaccccgtattgtgttaatcatttttaaatcgacaagttgagtcgtcacgcggcgtaattgaacaggatttaaacaagttaattcagctaatgaactactattgaatttttctgaatgatgcttagttaaaaaagttaatacatgtacggcaatgttaaattctaaattcaatggttctcacctcgtaattgtaactgtattagttacaattaaaaatcattttgctcaatgtgtcaatacttatgtttgaaaagtgttgaattaggtgtgattattatgatgatttattatttgaaagttgttgcattaacggtgagattgcgtaattgaattttagttatgtatgaactaatagatatgaaatgagtattgaaaataagggcaataaaattttgaatgatgatgttgtgtgattgtataaacttgttcgtattttagagacgttttgatatttcgcataatgaggaaatacttttaacaactgatgacatattttaatagtgaatatattttgagatattaatatatttaatgttaaggatgttgtcgcaataaaattaaaatattgaaagataatttttatttattaattgcgaatatacaaagacaccattatatccatatgctaaaataagaaaaaaggcgacatgttatctcaatttacctgcatctagactcctttacataagaaataatcatcgccgagttttaaaattttacaattttgtagatgtaaaaagcatttgattttaaatagtttgaaaatcatatatttttgaaaaaggagcatgccgatgagtattgacatgtatttagacagatctcgaaaccaagcttcaagtgtgggtaatttgagtcaaacaatgaattcaaattatgatgcgttggaaaaagcaattactcaatttatcaatgatgatgcgcttaaaggtaaagcgtatacgtcagctaagcaattttttagtacggtgttaattccattatcaacaagtatgaaaacattgagtgatttaacgaagcaagcttgcgataattttgtgtcacgttatacgagtgaggttgatagcatatctttaaaagaatcagagcttgaagaagatatcagatcattaagtcaacaaattacgcgatatgaaaatttgaataacaatttgaaaaagcatgcttccgataatcagcaagccatttcatcgaaccaacaaataatacgaacattaggtcaacaaaaacatgaattagaagagaagctacgcaaattgcgtgagtttaatcaaaaatcaccagaaatatttaaagaagttgaagaatttcaaaaaattgtacaacaaggacttacccaagcgcaaaatttttggaacttttcaacaaatcaatttaatataccttcaggtaaagaacttgattgggctaaagcaagtcatgaaaaatatttgaaagttgctatggggaaaattgaacaaaaagcagagaaagaaactttaaataaagcagactttgctgttataaaggcatatgctaaagaacatccagaagacgatatcccgaaaagtataatgaaatatataaatgacaataaagatagtattaaacgagatataggattagatattacgtcaacacttttagagcaaggcggtataaatgcaagtaaattcggtgtatttattaatacagcaggtggagtgaaaggcccagccggtccaaattcatttgtggaagtcaaacgtacatcaggtaatgtgtttatagaaaatggtagtaaatttgcaaaaggcggaaaatacctaggcaaaggtgttgcaggtgtaggatttggtataggtatgtatgatgatatggcaaacgatgataaaacagttggagaggcattgtcgcataatgctttaactacaggaataggtattggcgcaggtgcgggtatgactgctactatcgcgttatttgcaagtaatccagtaggatgggctgttataggtggctttgtgtttggttcggtttcgacaatgcttgtagattgggcttatcaaaataataaggctggtataaaagataaagcagactgggtaggacataaactagacgatggtatcgatgttgttaaaaaatctacagaaaaagccgtagatagtgttggtgaagctacaaaaagtatttctaatcatttaaaccctatgaaatggagctggtaaatgttgctatgtgaatctaaagttatcaacaaaaatcctaagtatagagttattaaatatggtgatgaatatttaatgattgatttagtaagtacctggttaactttatttcttcctatgattaattggttaattccaaaaaaatatgtcaaaatcagtaaaaaagaatttgacgatttaaacattgtcaaacctgttaaaaataaagctttttggccagttgcaggtagtactattttgttcggagttacgtttagaaaatatattccttcacttaatattcaattagagaaaaacatggtgattgtaatatgttgtgcaatatttctgggtgttttaatactttttttatttctgaatcgtaagctaagattggaaatttataataataactctagtaaagggaaaataattttatttccttcattaaaaaacttttgctttacaatattttattattttttatttggcggtctttcaataatggctctaagtatgttattaactttaaatcctcaaaatataataggctttattggttggttggtaatgactgcaggtttctttctgttaaacatgtcatcgattattgacaaaaaaatttatgtattatctaaaactaacacggtggaaaaatgatggtttagctggatttactgcgagttctgtttcgtcaatacttgtatattggaccaatcaaagaaatgaatttggaataaaaggtaaaaacgattggataggacataaactagacgatggtatcgatagtgttaaaaaatctacagaaaagccgtagatagtgttgggaatgttgttggtgaaggttcaaaaagtatttctaatcatataagccctaagaaatggagctggtaaatgttgctatgcgaatctaaaatcatcaataaaaaccccaaatatagaattattaaatataatgatgaatacttaatggtcgatataataagcacttggattagtttattttttccatttatcaattggttcatcccaaaaagatatgtcaaaatcagtaaaaaagaatttgacgatttaaatattgttaaacctgctaaaaaatgttttttggccagttgcaggtagctctgctttgctgggagttgcattaagaaaatatacacatttacttgacgttcaacttgataaaaaattagttattgccatatgttgcatcacatttatagggattttaatattttatgtacgcctaattaaaaaatcatctttaaatatttataatactaaaaataaaaggtcaaaaatttttttaatacctacactaaaaaatgtttgtttcacattatttggatatattttatttggcggattgactatgctattcctagatgcactattatcaatgagttaccaaaacataatagtatattttgcttggattgcagttatgatgggtttttttctagtgaatatagctttaattatagataaaaacattcatgtcatacttaaaaattaaatggtagtaataaatttagattaaagatatgcaaataacaatgaataaaatttttaatgatagtaagttgataatattttaatgtcttttgaagtatcgaaaaatgtattacacataaaattaaagggatgtggagacattgctttgcgaggtaatagctatatacaaaaatcccaaatatagaattattaaatataatgatgaatatttgatggtgaatataataaataattggttagttttatttattccattgcttaattggttgacaccaaaaagatacatcaagatcagtcaagaagaattagaaaatttaaatactttcaaacctgctaaaaacaatgcattttggccagcattaggtagttcagttttatttagtgtgacttttagaaagtatatgcctttatttaatgttagattggaaaaaacaatagtaatagccatattttttgttgtatttcttggtattttatttttctacctaaatttaaatcgtaggttagcattaagtgtttttactatgaataaagaaaaaagtcagaaaatgatattgctacctaatttaaaacattttttctttataatatttgcatatttatatttcggtggtttttcatttttcactttatatgccctgataactatagatgttcaaaatataattatatttatctgttggggtgcagtaactatgtttttcttttttataaacattgttcccattggcattaaaaaagctcatgtaatacttcttaaaaaaagctgaataataaaggagttttttaaatctaaaattattaaatttaatataaaaattcgactcatagatagaatgaataaaaatccgaaatatagaattatcaactacaaagatgaatgttttataatggatatcccatgttaatattaacagttttaatttctttgttatgcaaatcaaaacattatagtatttctaattgaatttgcaatggctttaatgttgtcgttcttaaatgatttttcaatttctgattcaaaagtacatgtaatttaaaggctaacaagcaatcgcactatgtgaatatcaacttaagcaatacttattttaactgagttctacataacatttttctaatacaccgcctaaattcaaaccctaattctaacatttggaagttgtattaaatcatgatagtgtgatagtggaaaagttataaagataaggagctgggtctaatgaagcaatttgtaaacttaggtaaatctgatgttgaagtgtttccaatcgcacttgggacgaacgcagtaggtgggcataatttatatccgaacttagatgaagaacaaggaaaagatgttgttcgtcaagccattaatcatggtattaatttattagatacggcatatatttatgggccagaacgatcagaagaattggttggagaagttgttaaggaatatccgcgagagcaaattaaaattgctacgaaagggtctcatgaatttgatgaaaatcaagaagtacatcagaacaatcaaccggaatatttaaaacaacaagttgagaatagtttgaaacgtctacaaactgattatatcgatttatattatattcattttccagatgacaacactccgaaagatcaagcagttgcagcattacaagagcttaaggaacaagggaagattaaagccattggtgtatcaaatttcacattagatcaacttaaagaagcaaataaagatggttacgttgatgttgtacagttagaatataatttattgcatcgtgaaaatgaggcagtattacaatattgtgttgatcaccaaatcacatttattccatatttccctttagcatccggtattttagctggaaaatatgatgagaacactaaatttagtgaccatcgtactacacgtcgtgattttaaaccaggtgtatttgaagaaaatgtgcgtcgcgtaaaagctttggaaagcatagctgcagcacatcaaacttcaattgcgaacattgtattagcattttatttaacgagaccagctatcgatgtgattattcctggtgcaaaacgtgcagaacaagtcattgaaaatattaaagctgcagatatcgttttatcagatgatgagattcaatatatcgatgaactgtttccaattgaagactaaatgaattgtatttaatggtgacatatgtatctaattcatcatgaattagccccgtatcacaaacgactttatataaggcatgacgaaatttcgtcaaatttatataaaagttgtaagcgttttactattcggtaggtaaagcttatgatagtataattaggtaacgaaaaacacagatatttattaatcaaaagtgaggttaggctaaaatgattactgttttgtttggtgggagtagaccaaacggtaatactgcacaattaacaaaattcgctttgcaagatttagagtatcaatggattgacgtgacacaacatcagtttaaaccgatacgtgacgtgagacatacagcagagactattacttcatatgacgatgactatttgccgattctagataaaatattggctagtgatacgattatttttgcatcaccagtgtattggtatagcatttcagcaccattgaaagcatttatcgaacattggtcagaaacattacaagataaacgatatcctaattttaaggcacaaatggccgaaaaggattttagagttattttagttggtggagattgtccaaaaataaaagcgaagccagcaattacgcaaatgaaatatagtttagactttttaggtgccactttaaatggttatattattggaactgctgaaaagcctggtgacatcatgaaagacaactatgccttagcacgtgcaactgagtggaatagtatattgcaataagacatacctcatactaaacgaagtgattttttgcttcgttattttttatttttaattttaacggaaaatataaatatataaattgaatagacaatcattgtttattaagtattgagcaagttgtggtataatgccgttattaaaacttgttaataaggggagaaagtcatgttcaaggtaagacaagcaactgaaaaagatgttgttcaaattagagatgtcgcaactaaagcttggtttaatacatacttaaatatatacgctgcgacaacagttaatcacttgttagaagcttcatataatgaacatcatttaaagaaaagacttcaagaacaattattcttagtcgttgaagaaggtaatgacatcgttggctttgctaactttatttacggtgaagaattatatttatcagctcattatgttaaaccagaatcgcaacatacaggttatggtacagcattgttaaatgaaggattatcacgttttgaagataaatttgaaggtgtttacttagaagtagataataaaaatgaagaagcagtagcttactataaagagcaaggttttacaatcttacgctcttatgagccagaaatgtatggcgaaaagttagacttagcacttatgtacaaagcattttaagtaaattaaatattatattaaacgaaaaggaggggaataatgactaacgcatatgtagatttaaaattagtagaagaaaaagtttttaaagacccgatacatcgatatattcatgttgaagatcaattgatatgggatttaattaaaactaaggaatttcaaaggttacgtcgaattagacaattaggaacactgtacctatcttttcacacagcagaacatagtcgctttggacattctttaggtgtgtatgaaatagttagacgattaattgatgagtcatttattggtcatgatgcatgggacaataaagatagaccgttggcattatgtgctgcattattacatgatttaggacatggtccattttcacatagttttgaaaaaatatttaatacagaccatgaagcatacactcaagcgattattactggagatactgaggtgaatgctgtattacgtaaagtatcgcctgagtttccaagagaagttgcggaagtaattaataaaacgcatcataataaattggtcatttcgatgatttcttcacaaatcgatgcggatagaatggattatttacaacgtgatgcgtatttcacaggtgtgtcatatggtgcttttgatatggaacgtattttaagattaatgcgaccttctaaagatgaagtactaattaaagaaagtggtatgcatgcagttgaaaactttattatgagtcgttatcaaatgtattggcagatttatttccacccagttagtcgtggtggagaagtgctgcttaataattgtttgaaacgcgcaaaacagctttataatgaaggctatgaatttaagttgcatccacatgattttattccattttttgaagagacagttacgattgaacaatatgttgaactcgatgaagcggtagttacgtattatttggaaaaatggacaaaagaagatgatgccattttaagtgatttagcaagtcgatttattaatcgagacttatttaaatatattccatttgatggctcaattattacaatatcagaactgcaagaactgtttgaagcaggtggtattaatccagattattattttgtgagtgaagcattttcggatttgccatatgactatgatcgacctgggtcaaatcgcaaaccgattcatttattaagacaagatggtaagattagagaaataagcaatcaatctttagtcattcatagtattacaggcattaatcgccaagactataaattatattatcctagagaaatggttgcaaagattaaagataagacaattagagaagctattgaaaatttgattaatgagcttaattaaacagggctaaaattgttatcgttaaatatggaggttatatcattgtctgagaaaaaaggctttaattttaatatcataaaaaatgaccctctagatggtcataaaggtacaaatattggttcaattagcttagacaatattgcaccagtttttatcgatgttgctaacaaagaagcatttattgatattggaggcatgcatgctcgcgccaaagttgaaaaaggcgtgaaatggattactgataaagctgctgttgaaggcgatgaagctaaagaatattggttgtgttgggtaacaacagaacgtaatgaacaaggaccatattatgctggtttaacagcgtgctatttattagtgaataaagcaattcgtcgtggttataaaagtatgcctgaacatgttaatatgatggataaatcaatgaaacatcatattatcattgatcaaattggtgacgagaataaagctattttaaaagactttttaatgaaccatgatgaaggtatgtggaagcattcttctgatgcattacatcaagcatttaattaaatattagaaactaaaatttcccaattaatctataaagatatgattcatttctcaatgacgacgtaaatcttgaggtgaaaataaagtcttagattgattgggagtttttttaatttttttgaaattaaattaatctgtagttaataaaaaatttgaataactgacacatttttttgatcatagctatatactttgtgaattaattcacattataataagagtgaagataagagtattataaattatctttaaataaatatatgtgaagtaaaaattacacgttagcatatcgattatgtcatttcttttaacatattaactagggaaacgttaaaagttaacggttgatatctaactaaaaacaaagtcacaatagtatgttttaatttggcgtctattacaaataaaaattacatctataattattcgttttcatttttgaaagtaatcaccaattaatatcatacatactggagtgactataaggaggacattattatgagagcagcagttgtaacgaaagatcacaaagtaagtattgaggacaaaaagttaagagctttaaaacctggtgaagcattggtacaaacggaatattgtggcgtttgtcataccgatttacatgttaagaatgctgattttggtgatgttacaggcgttactttaggtcatgaaggtattggtaaagtcatcgaagttgcagaagatgtagaatcattaaaaattggagaccgtgtgtctatcgcttggatgttcgaaagctgtggaagatgtgaatattgtacaacaggtcgtgaaacactttgccgtagtgtgaaaaatgctggttatacagtagatggtgcaatggctgaacaagttattgttactgcagactatgctgtgaaagtacctgaaaaattagatccagcagcagcgtcttctattacatgcgcaggtgtgacaacttataaagctgtaaaagtaagtaatgttaaacctggacaatggttaggtgtttttggtataggtggtttaggtaacctagctttacaatatgctaaaaacgttatgggggctaaaattgttgccttcgacattaatgatgataaattagcattcgcaaaagaattaggtgcagatgctattattaattctaaagatgttgatccagttgcagaagttatgaaattaactgataacaaaggattagatgcaacagtggtaacttcagttgctaagacgccatttaaccaagcggttgatgttgtaaaagctggtgcaagagttgttgccgttggtttacctgttgataaaatgaacttagatatcccaagattagtgctagatggtattgaagtagtaggttcacttgttggtacaagacaagacttacgtgaagcgtttgaatttgctgctgaaaataaagtaacacctaaagttcaattaagaaaattagaagaaatcaatgatatttttgaagaaatggaaaatggtactataactggtagaatggttattaaattttaaaaatatcaaatgactttatagataaagaaggtagtgctctgaacactatcattataatcaaacacgaggttttcatgaaagatagtgaaaatctcgtgtttttttggttttgaggttttgtttgtattttataaaatggcttacatatatcaagcgttgattaagtatggaattgttaattaattgaacctatttagctttaagaaggcataacaagatgaccttattttatgctataatatttctattatgcgaagattaaggtgagtagtaaattggataaaaaagtaagtattcatacaaagcaagtgttgaaacagcacaacgaaaaagaaaaatttgaatttactactgaaggaacttggcaacaaaggcaatctaactttattcggtatgtagaacaaattgaggatgcaacagttaatgttacaataaaagtggatgatgatagcgttaagttgattcgtaaaggcgacattaatatgaatttgcattttgttgaaggacaaacgacaacaactttttacgatatatcggctggacgaattccactagaagttaaaacattacgcattttacatttcgtaagtggagacggtggcaagttaaagattcattatgaattatatcaagataatgaaaaaatgggttcttatcaatatgaaattaactataaggagataggcgaatgaatattattgatcaagtgaaacaaacattagtagaagaaattgcagcaagtattaacaaagcaggattagcagatgagattcctgatattaaaattgaagttcctaaagatacaaaaaatggagattatgctactaatattgcgatggtactgactaagattgcaaagcgtaatcctcgtgaaattgctcaagcgattgttgataacttagatactgaaaaagcacatgtaaaacaaattgacattgctggtccaggattcattaatttttacttagataatcagtatttaacagcaattattcctgaagcaattgaaaaaggtgatcaatttggacatgtaaatgaatcaaaaggtcaaaatgtattgcttgagtatgtttcagctaaccctacaggagatttacatattggtcatgctagaaatgcagcagttggtgatgctttagctaatattttaactgcagctggctataatgtaacacgtgaatattatattaatgatgctggtaatcaaattactaacttagcgcgttcgattgaaacacgtttctttgaagctttaggtgacaatagttattcaatgccagaagatggctataatggcaaagatattattgaaataggtaaagatttagcagagaaacaccctgaaattaaagattattctgaagaagcacgtttgaaagaatttagaaaattaggcgtagaatacgaaatggctaaactgaaaaatgatttagcagagttcaatacgcattttgataattggtttagtgaaacatctttatatgaaaaaggcgaaattcttgaagttttagctaaaatgaaagaattaggttatacgtatgaagctgatggcgctacatggttacgtacaactgattttaaagacgacaaagacagagtattaattaaaaatgacggtacatatacgtatttcttaccagatattgcgtaccacttcgataaagttaaacgtggtaatgacattttaatcgatttatttggtgctgatcatcatggttatattaaccgtttgaaagcatctcttgaaacgtttggtgtagatagtaatcgtttagaaattcaaatcatgcaaatggttcgtttaatggaaaatggtaaagaagtgaagatgagtaaacgtactggtaatgcgattacattaagagaaattatggatgaagttggcgttgacgctgcacgttatttcttaactatgcgtagtcctgatagtcactttgattttgatatggaattagcgaaagagcaatctcaagacaatccagtttactatgctcaatatgcacatgcgcgtatttgttcaattttaaaacaagcgaaagagcaaggaattgaggtagctgctgcgaatgattttacaacgattacaaatgaaaaagcgatcgaattgttgaaaaaagtagctgatttcgaacctacaattgaaagtgctgctgagcatagatcagcacatagaattactaattatattcaagatttagcttctcatttccataaattctataatgctgaaaaagtgttaacagatgatattgaaaaaacaaaagcacatgttgctatgattgaagcggtcagaattacattgaaaaatgcattggcaatggtcggtgtaagcgcacctgaatcaatgtaagaacatttatatacactccaacgtagagtttctcgaaagatactttgtgttggagtgtttttttatttggtatgtgacatattggggaatgcttagtatgtgaataaggttaaaggaatacagttggtttgcgcagcaactgcaaaagagcccctaatcgctaaagctcaagggggggaaaggaatacagttggcttgcttgcgcacaactgcataagagcccctaatcgctaaagctcaagggggttaaaggaatacagttggtttgcttgcgcagcaactgcaaaagagcccctaatcgctaaagctcaaggggctctaaaaggaggatgtaaatgttaggaactgatgaattgtataaattgttatataggcatatgggacctcaaaattggtggcctgctgataatgacattgaaatgatgttaggtgcaattttagttcaaaatactagatggcgaaatgcagaaattgcattgaatcagattaaagaacacacgcattttaatccaaatcatatattagaactacctattgaaacgttacaatcattgatacgtccaagtggcttttataaaagtaaatcactgacgattaaaacattattaacatggttagcacgacatcatttcaattatcaagagattaatgagcgatataaaggtgaattaagaaaagaattattatctttgaaaggtattggaagtgaaacagcagatgtcttacttgtttatatattcggacgtattgaatttattccagatagctatacaagaaaaatatataataaattaggatatgaaaacactaaaagttatgatcaattaaaaaaagtagtcacattaccaaatcattttacaaatcaagatgctaatgaatttcatgctctgttagatgtatttggtaaacattactttagagataaagatataaagaattgtgattttttagaaccttactttaaaaagtaaacgctgtgaagttagatagatgagtttatatgaaatataaaaaataatttactattttcttttagtatgtggacttatataataaatagaagcatataaagaaaaaagttgtttgtttgtgcagcaactgcataaaagcctctaatgactaaaggtgaagaggaacgcagttggatgctaccgcacaactgcataaatccctctaatcgctaaaggtgaagaggaacccagttggatgctaaggcacaactgcataaatccctctaatcgctaaagcgaaaagtgggattaaaggaacgcagttggatgtaaccgcacaactgcataaaagcctctaatcactaaagttcaagaggctttaaaaaggagatgtgataatgtgaagaaatcgttaattgcttttattttgatttttatgcttgttctgagtggctgtggtatgaaagataatgataaacaaggtagcgacgataatggctcgtctaaatcgccgtaccatagaattgtttcgttaatgcctagtaatactgaaattttatatgaattaggattaggtaaatacatagttggtgtttcaacggttgatgattatccaaaagatgtgaaaaagggtaagaaacaatttgatgctttgaatctaaataaagaggaacttttaaaggcaaagccagatctaattcttgcgcatgagtcgcaaaaggcaactgctaataaagtattgtcatcattagagaaacaaggcatcaaagtagtgtatgttaaagatgcacaatcaattgatgaaacttacaacacatttaagcaaattgggaaattaacgcatcatgaaaagcaggctgaacaacttgttgaggaaactaaggataatatcgataaagtcatagattcaattcctgctcatcataaaaaatcaaaagtatttattgaggtttcatcaaagcctgaaatatatacagcagggaagcatacatttttcaatgatatgttagaaaaattagaagcccaaaatgtttatagtgacattaatggttggaaccctgtaacgaaggaaagtattattaaaaagaacccagatatattaatttcgacggaagctaagacaagatcagattatatggatatcatcaaaaaaagaggtggattcaataaaattaatgctgtcaagaatacacgtattgaagttgtaaatggtgatgaagtatcaagaccgggtccacgtattgatgaaggattaaaagaattaagagatgcaatttatagaaaataaaccattctaattatgccccttattgctacatgtaataaaaattacatgtttgagataaggggttttaaaatatatttagtgaatgatagcaacgcgagtatgtgattgctataatgaatgtaattatcgatgaaagaaaagagaatgctatgacatttaataaagtattattgagctggatagtcatattgattataacaactagcatatatctattttggcagttgggggatatcaatgatgtatttaaccagtctattttaatcaatgttagattaccgagattattagaagcattgttgacaggtatgatattaactgttgcaggtcttatatttcaaacagttttaaataatgcattggcagatagctttacattaggattggcaagcggtgctacatttggttcaggattagcattatttttaggattaacaacgttatggattcctgtattttcaataacatttagtttaataacattaataactgtattagtcattacgtcggtattgagccaaggctatccagttagaatcttaatattaagtggtttaatgattggtgcattattcaattcacttctatattttttgattttattaaaacctcgcaaattaaatacaattgccaattatctgtttggtggttttggtgatgcagaatactcaaatgtatccataatagcaatcacatttatcattgcactgtttggtatatttatcattcttaatcaactaaagttattgcaattaggagaactaaaaagtcagtcactaggcttaaatgttcaaataattacatatatcgcgttatgtatagcttctatgataacggcgataaatgtcgcatatgttggcataattggattcattggtatggtgataccacaactcattagaaaatggcagtggaaacaatcattaggaagacaattggctttgaatattgtaattggaggacaaataatggttatggcagattttattggtagccatatattgtcacccgtacaaataccggcaagtattatcattgcattaattggtataccagtgttattttacatgctaatatctcagtcgaaacggttacactagcacatgacatttgctaaaataaaaataactataaacataaagagggcataagcgatggatttgaatcaaattaaagcagttgtatttgatttagaaggtacgttgttggacagagttaaatctcgagagaaatttatcgaagagcaatatgaacgatttcatgactacttaattcatgttcaactggcagattttaaaaaagcatttattgagctagatgacgatgaagataatgataaacctgatttatataaagaaatcattaaacgtttccatgtagataggttaacttggaaagacttatttaacgattttgaaatgcatttttatcgttatgtatttccttattacgatactttgtatacactagaaaagctatcgcaaaaaggctttcaaattggtgttatcgcaaatggtaaatctaagattaaacaatttcgattacattcacttggtttgatgcatgttattaattatttatcaacatcagaaacagttggttttcgtaaaccacatcctaaaatttttgaagatatgattgatcaactaggggtattacctgagcaaattatgtatgtcggtgatgatgcattgaatgatgtagctccagcacgagctatgggcatggttagtgtatggtataaacaagaagatgcagaaattgaaccactcgaagaagaagttgattttacaattacaacagtggaagaattattaaccattttaccaataaaaattgataataaaggagaaaattatggatctatttactagaaaagatggaacatcgatacattacagtacattaggtgaaggctatcctatcgtattgattcatactgtacttgataattattctgtgtttaataaattagcagcagaattagcaaaatcatttcaagttgtgttaattgatttacgtggacatggctattctgataaacctcgtcacattgaaataaaagatttttctgaagatattgttgaattacttaaatatctatacattgaagaagttgcatttgtatgccatgaaatgggtggaatcattggtgcggatatttcagtacgttatcctgaatttacatcatcacttatgttggtaaatccaacatctattgaaggtgaattaccggaagaacgtttatttagaaaatatgcccatattattcgaaactgggatcctgaaaaacaagataaatttttaaataagcgtaagtattatcgtccgagaaaaatgaatcgattcctcaaacatgtcgtagatacaaatgaaatatcaactaaagaagaaattcaagcagttaaagaggtattcaaaaacgctgatatttctcaaacttatagaaatgtcgtagtaccgacaaaaattattgcaggagaattcggtgaaagaacaacaagattagaagctaaagaagtagctgatttaatccaaaatgcggactttgaagtatatcaagaatcaagtgcattcccatttgttgaagagcaagaaagattcgttgaagatacagcttcatttatcaacaaacatcacgatgaaaagcatgtttaatttttagtgataagtgaaatataaaagtagtaattattatttgtaatataattgtaatatgactgttgttttagaaatgattgttgtataatggttgtgagcacaagacgatataaataaaaggagagagtgcttatgaaaaagctactaacggcaagtataattgcatgttctgttgtaatgggagtaggcatagcgaacactagtgccgaagcagcaagtggcaactctattgatactgttaaacaattaattaagggtgaccagtcattagaaaatgtgaaaattggcgaatctattaaagatgttttaactaagtacaaaaatccgatgtattcttacaatgaagatggaactgaacattattacgaattccatactaaaaaaggtatgttattagtaactactgatggtaagaaaaacaatggtaaagtaactcatatttcaatgatgtataatgatgctaatggtccaacatatcaagctgttaaaaattatgttggcaaagcagtaacacatacggaatatagcaaagttgctggtaattttggatatattgaaaaaggcaaaacgacttatcaatttgcctcagcaccaaaagataaaaacataaaattatatcgtattgatttggaaaaataataattaaattaatcgtgcttaaccgacaagttaaatcgcaatacttgtcggttattttattacatggcataatacagtgaatattaatttttatgatttgcgaaggggatattaaaccaatacaataaataaagatgtttcattttaaaggagtactaccaatgcgtattaacgataaaattttactagaaaatatagaagattactttaatcataaaggtttatcaccgcatttgattgatgatattaaagagaaagtaattactgatataaaaaattctgaaaagaaagatcaagattatattgaatataaaagaaaatctccagcacaaatcatattaatgattcaaaggaatttgtttgctttacaaatgaatccagttattttctttattataaatttcattctcatatcctatttatatgataaacagtatgttcagtttcaagctattactggaatgagtctattttattgtttagtgatttttccaatgactattgttgtatacctaagggtgtctcaaaagaattacttgcgtagtaataaaatagaaatggttatgggtacaattatcgctatcatatccctgttattaattatattacaagcatttaatattacttggggcgttataccaattacaaattttggacatcaatttttctttttcattggtattattttagtaattgccggcatattttataagcgacttgagttttcgggaatcggcttattattttgtcaaaaaaccgtagatgcaatgattcataatccacaatcagcccagactttttcattaattatatggatattattagtagttctagttatatatttcacaattagattatcttcacgtacaagattataaatatgataaaactattcacttgattaattgtattaattgagatgaatagtttttttattgttggaataacttttggtaatttataaataatttaaaaaaattgtttataaaatggaagcgtacatagaatgaaggttgggtatatagtttattgagggaggtgtcacaatgaataaagtcacaattaatcctcaaatccaattaacttatcaaattgaaggtaaaggggatcctataatattacttcatggattggatggtaatttagctggatttgaagatttgcaacatcaactagcatcatcatataaagtaattacctacgatttaagaggtcatggcaagtcttctaaaagtgaatcatacgatttaaacgatcacgttgaggatttaaaaattttaatggagaagttaaatattcatgaggcacatattctaggacatgatttaggtggggtagttgctaagttatttacagataaatatgcttatcgtgtaaaatcattaactaccattgcatcgaagaaagatgacttaatacacagctttactcaattgttaattcaatatcaagatgatatagcgggttttaataagtctgaagcgtatattcttttattttctaaattgtttagaaatcaagagaagacgatgaaatggtatcaaaaacaaagaatatatagcattaagtctgaggatgatagtgcggtggcaattcgttcattaattttgcataaagatgaacctatgtatttaaaaaaacgtacatgtgtacctactttgttaattaatggggaacatgatcctttgattaaagataagaatcattttaaattagaagcgcattttttaaatgtaacgaaaaaaatcttcgaacattcaggacatgcaccgcatattgaagaaccagaagcatttctaagttattatctaaattttttaaaaagcgtatcataatatgtgatatataaagctagggcataaagcccttaggcaatgtgaaaaagctgattactattcattatttgatagaaatcagcttttttgaaatgtatttgatatatactgctcgttaagcggctatcttccttatattaagtgccattagtgcaaaaccgcttaacaattaggtaaaaagagcataaaaaaaggaagtttaatagaatgtatcatctatcaaacttcaccaaattgcgctaaacaaaattatagttcaatttcgttgtttgcttcagtgattcgtttatttactcgactcaataatgattcgatttttttacgttgttgtgcattaacaagaattaatacagttctttcatcatgctcattacgttttttatcgaagtaatcttcttgagataaaattttaactgctttaacaacttgtggttgtttgtagtttaaatgattaataatatctttaagatagtattctttctctttgttttcgctgatgtatgtcaatacagcgaattcttcaaagctaattgaaaattcctttttaattaaactttttaatttgtcagcataagtgaccattgataacaactcaaagcaatcattgatttttgtaattgccatggttaaaacctccctatttgatgcatcttgctcgatacatttgcccgataatatattgatatctaatctttatttattatagatatgttagtcataattttgcattaaataagttttattaaatatatttaatgctctattatttagttaattataactaattaaaaatgagaagtaaacaaaaaagtgtttataaaacaaattattcattagacacagtgattgtatttctgggttagcatttggattagtcaaaaagatcagcattttttattatttaccttaatttaatcgtcagtacaaggtaatttatttaatgaaacgatttagcgcaattaaatgtttcaatattcaatgtgtatctaaagtgattctttgtcatagcttaacgctttcaagttaacttcttctaatatttatacccatttttcgaacttttatcactaaaaaagaaaaatttttataatttttttaatttagtaattcccagtgcagttttaatgataagaaaaatacactattttaatgacaaaagtaaaactatagcactttaaagtaaatgtatagtaatccgattgataacaagtaatcaatattagaaagtacgattatggttcataatttaaagcatcttcaatctttaaagtcgactcaatgaatgaattaaagttgtacattttgacttatttttaattaattgaataaccaactatgaaatattagcacgaataacataaattttgctattaatttggtgtaaattattaaaaaataacattaatttaggtcttaagaatgagttgactatcgaatttgctaaattaaaatttgttgtgtcaaagcatactacccatattagtacttattaaaactaatttagaccacaaaaaaatagcttatcacttttaaaaataattacaagttaaaatgataagctaaatgttaaattaaaataatcttaaaaatataatccctgtcaatatacacaacaggcctatagtttttcttgatgtcatagctattttaggtgaaccaaatagggcaaagtgatcaatgagtatgcccataagtatttgaccaaacataccaataagtgttgttaatgctgcacctaaatggggcattaaaattatattagatgttacaaaagccatgcctagtataccgccagtaaaatagataggttttaatttaccgaattttaaatgacttgtttttagttttaaagaacgattaaaaatagcggttaaaatcaatagcgttattgacccaattgtaaatgatactaatgatgcaaaggctggtgaatgagtatgacttgctaataaactgttaattgtcgtttgaataggtggaaagaaaccaaaaataaatcctaagagaagccaaaacaataaatacttttgatcagttagtaataaattattcttgttaaattgattcattatgacgataccgataatgagtaacaatactccaattgctttaattaaattaaaatcatgaattgtagcaccaaataatccaaatgtatcaataatgacacccataataatttgacccgcaactgttgcaattacagttaatgttgcacctaattttggcaataacaataaattgccagttaaatagccaacaccgagtaatccgccaacgaaccaagtatagttgaatgtttgattactaaaaaagtgtaatgagaaaacgtcaggatttataaaaatatttaagacgattaagcatatagtacctactgaaaatgaaataaatgatgtatagaaaggtgatttagtatacagtgatagtcttgaattgacagatgtttggataggaataagcattccaactaggacaccaatgatatagaaaagaagcatatgaataaagtctcactttccaaagttaataataaaaaacatatgtatagattatcactatagagaaaaaatacaacttatttttaaaagagataaaagtaaagcgagtgccataataataccccagtcaatcaagaagaaagactggggcgttaatgattatattcaatgaatgactacctatgtttgagactatttctttgcttcaaataaaacggtcgtcgttttatcaataatttgagcagaatgtactttggtgatagcgccactattagactttaaaatatttaaatctactaatgcattcatactatcacgtgcaacttgctcggttacgatgttgtttaattgtggtaattgcaatttgacaggtttgtctaatgaagatttaaaacttaattcaagtgttttggtcatgaaagtgtcctcctgattaaattgatacagatttgatgacttcgatgttattgtatgtttctccagtaagtcgctcgataagtttgctaaatgttttaatttggtcgtttgatacttcaggattaatattggcgaatcgacgtttaaattctgtttgtttaccatttgtatctagttttgtaaatgataatacaattgtaatgtgatttgttttactcatattttaaaacctcctttcacactatatatcgaaagaaaaaaataattgggttaattttattattcttgtttaaattctataaaaaaggttataattatatgtgacttaaatacttaatgtttatgattaagacacttaaagcaaggagggacatatgaacaaggtagaagtaattaaatgcaatgatgatattaataaaatgtatgacgcgctcaaagctcgatctgatagggattatttgttttttaaattagctatacatagtggtatgaaaataacagaattattaacaattactgttgaagatactaaacgactgatagaaaaggggacactaagcgaattgtgtaaagcccattatcactcattgattaaaattagattgccagaaacattatctaatgagttacttcattatattgaaaacaaaagtctgtcaaatgaagatgtattatttcaatcattgagaactaatcaagtattatctaggcaacaagcctatcgtattattcatcaagcagcaattaaggctggcatagagaatgtaggactaacgacattgcgtaagacatttgcgtatcatgcatatcaaaagggcatacctattcctgtcattcaaaagtatttagggcatcaatcagctatagaaacattgaattttatcggtttagaaaatgaatgtgaacacagtatttatatttcattacaattataacgaaaaaggaggctaataatgagtttggtttatctattaattgctatactagtaattatggcgatgatattattaacatctaaacgtagagcaatggctaaatatgcaggatacatagcgctgactgcacctgtaatagcatctatttattttttgttacaagttccatcagtaattaaacagcattatttgtctgtttccattccgtggatgacctcattagatattaatgtagatttacgtttagatggtttgagtttaatgttttcccttattatttcccttattggaatcgctgtattcttctatgcaacacaatatttatcctctcgtaaagataatttaccaaggttttacttatacttaacgctatttatgtttagcatgctcggtattgtattagctgataatacaatattaatgtatgtgttttgggaactaactagcgtatcatcatttctattaatttcatattggtataacaacggagatagtcaatttggtgcgatgcagtcatttatgattacagtatttggtggtttggcattattagttggttttatcatgttgtatatcatgacaggaacgaataacatcacagagatattaggacaagcagatcatattaagaaccatgctttatttatccccatgattatcatgtttttattaggtgcatttacaaagtctgcacaattcccatttcatatttggttaccaagggcaatggcagcgcctacacctgtaagtgcatatttacattcagccactatggttaaagctggtatctttttattacttagatttacacctttgttaggtctaagcaatatgtatatttatatcgtaacctttgtcgggttaataactatgttatttggatcaatcacagctttaaaacaatgggatttaaaaggaatcctagcatactctacaatcagtcaacttgggatgattatggctatggtgggtataggtggcggatatgctcaacaccaacaagacgcaatagcatctatttatgtatttgtgttatttgcagcattgttccatcttatgaatcatgcaattttcaagtgtgcgcttttcatgggtgtagggattttagatcatgaagcaggttcaagggacatacgaattttaagtggcatgcgtcaattatttccaaaaatgaatcttgttatgatgattgcggcgctatctatggctggtgttccatttttaaatggatttttaagtaaagaaatgttcttagatgctttaacacaaactggacaattgtcccaatttagtttgatttcaatgattatcatcgtatgtatgggtgttattgctagtatttttacattcacatatgcactttacatggttaaagaagtattttggactaaatatgattctaaagtgtttactaaaaaaaatatccacgaaccatggttgtttagtttaccctctcttatattaatggtgctagtacctgtaatcttttttgtgccaaatatatttgggaaggggattatcgttccagcattaagaggtgtatcaggtggtaatcatcaaattgatccattggtaccacatgtttcgcaatggcatggatttaacataccgcttcttttaaccatcatcattattttattgggtagtgtactagcaatcaaagtagattggaaaaaagtgttcacaggtaaaattagacaaatttcagtttcaaaagggtacgaaatggtttaccgacaatttgaaaagtttactacgaagcgatttaaacgtgttatgcaagatcgtttaaatcaatacattattatgacactgggcatatttatggtaatcatcggatacggttatattcgtataggactaccaaaagttcatcagttacatgtttccgaatttggaccgttagaagttatattagcaattgttacagttatcattggtttgtcattaatatttatacgtcaacgactaaccatggtcattttaaatggggtcatcggttttgttgtaactttattctttatagcaatgaaagcacctgatttagcattgacacaacttgtagttgaaacgattacgacaattttatttattgttagcttttcaagattacccaacgtaccaaggtctaaagttaataaaaaacgagaaataattaaaatttcagtatctcttatgatggcgctgattgttgtgtcacttattttcatcgcgcaacaagcagatggattggcatcgatttctaatttttatcttagagcggataaattaacaggtggcaaaaacattgtgaatgcgatattaggagactttagagcattagatacattgtttgaaggtttagtattaattattactggattaggtatttacacattattaaattaccaagataggaggggacaagatgaaagagaatgatgtcgttttaagaacggtcacgaaactcgttgtatttattttattgactttcggattctacgtcttcttcgctggccacaataacccaggtggtggctttataggtggtttaatatttagttccgcgtttattttaatgtttctagcttttaatgtcgaagaagtattagaaagcttaccgatagattttagaattttaatgattattggtgcattagtttcatctattactgcgataatgccaacattttttggaaaaccttttttgtcgcaatatgaaacaacattgacactaccaattttagggcacattcatgtaacgacaataacactgtttgaattgggcattttgttctcggttgtcggggttattgtaacggtgatgctgtctcttagtggaggtcgatcatgaatttaattttattactagttataggatttttagtatttatagggacatatatgatattatctataaatttaattcgtattgtcataggtatttcaatttatacacatgctggtaaccttattatcatgagtatgggcacttacggctctaataaatcagaaccgctgattacaggtggaaatcaattgtttgtcgacccactgttgcaagctattgtattaactgcaatagttataggttttgggatgactgcgtttttacttgtcctcgtttatagaacttataaagtaactaaagaagacgaaattgaaggcttaaggggggaagatgatgctaagtaatttgttaatattaccaatgttattaccattcctttgtgccttaatccttgtatttttaaaaaataatgaccgtatttctaaatatttatacttaggtacaatgactatcaccacaattatttcattaatgctattaatttatgttcagcggcatcgtccaattacattggattttggtggttggactgcaccatttggaatacagtttttaggagattcgttaagtttaatcatggttacaaccgcttcgtttgtgattactttaattatggcatatggatttgggcgtggcgaacataaagcaaatcgttatcatttaccttcatttatattatttttaagtgttggtgtgataggctcttttctaacatcagatttatttaatttatatgtcatgtttgaaattatgttacttgcgtcatttgtactcattacacttggacaatctgtagaacaattacgtgccgcaattatttatgttgtcttgaatattattggttcatggctattcttattaggtataggtttactttataaaacagtaggtacattaaacttttcacatattgcaatgcgtttgaatgacatgggagataatcgcactgttacaatgatttcattaatcttcttagtcgcttttagtgcgaaggcagcgctggtcctttttatgtggctacccaaagcatacgcagtgttaaatactgagcttgcagcattatttgcagcgttaatgaccaaagtgggcgcttatgcattgattcgcttctttacattattatttgaccaacataatggtcttatacatccattgctagtaacaatggcagctataactatggtcatcggcgctattggtgtcattgcttataaagatattaaaaagattgcagcttaccaagtcataatctcaataggatttatcattttaggtttaggaacaaacacgtttgcaggtattaatggtgcaatattttatttagtaaatgatattgttgtaaaaacattgctattctttattattggtagtttagtttatattactggttatcgacaatatcaatatttaaatggtttagcaaaaaaagaaccattctttggtgttgcgtttattataatgatttttgctattggcggcgtgcccccatttagtggctttccggggaaagtacttattttccaaggtgcattgcaaaatggcaactatattggactagcgttaatgattattactagtctaattgctatgtacagcttgtttagaatacttttctatatgtattttggagataaagatggcgaagaagttcattttaagaaaatcccacaatatcgtaaaggtattttaagtattttagtagttgtggttatcgcaatcgggattgcagcgcctgtgctgttaaaaataactaatgatgcaacagaacttaatacgaacgatcaattatatcaaaagcttgttaatccacatttgaaaggagaggaataaatgaatcaaattgttttaaatattatcattgcattcttatgggttttatttcaagatgaagatcattttaaattctcgactttcttttctggatatctaattggtttaattgtcatttatatattacacaggtttttcagcgatgatttttatgttagaaaaatttgggtagctattaaatttttaggtgtttatttatatcaattaataacatctagcattagcacgattaattatattctttttaaaacaaaagatatgaaccctggattactttcttatgaaacaagactaacaagtgactgggcaataacatttttaacaattttaattattataactccagggtctacagtaatacgaatttctcaagactcaaaaaagttttttattcatagtatcgacgtgtctgaaaaagaaaaagatagtttgttaagaagtattaagcattatgaagacttaatattggaggtgtcgcgatgatacaaacaatcacacatattatgattattagttcactcattatttttggaattgcattaatcatctgtttatttagattaatcaagggacctacaacagcagatcgtgtcgttacatttgatacaacaagtgctgttgtcatgtctattgtgggtgtcttaagtgtactaatgggcaccgtttctttcctagattcaatcatgctcattgccattatatcttttgtaagctctgtatcgatttcaagatttattggtggggggtatgtgtttaatggaaataacaaaagaaatctttagtcttattgctgctgtgatgttgttgttaggtagttttattgctcttattagtgcaataggtatcgtgaaattccaagatgttttcttaagaagtcatgctgcaacaaaaagttcgactttatccgtgttattaactttaattggtgtattaatttattttattgtgaatacaggatttttcagtgtgcgtttattactgtcacttgtttttattaatttaacttcaccagtcggcatgcacttagtcgctcgcgctgcttatcgcaacggcgcttatatgtatcgaaaaaatgatgatcacacacatgcatcaatattattaagttcaaatgaacaaaactctacaaaagcattacaattacgtgctaaaaaacgagaagagtatcgtaagaaatggtatcaaaacgattgaagtattggctaaattgttaagcataacaatacttttgaagatttgttttcaaaattaatcattaaaagagtactttgaaattggttagtcgattttaaggtgctcattttttgtattataagttaatgttgttatgtgaaagcaagttgtttatttatacaaacaattagtgataaaataaaattaaataattgcaaatttaagtactgcaatcgtagacatatatctatattaaagtgcttttgtggtcgctaactcaatttatcctctaaagtataattacaacgagatgtgatacttatttttcaattaaacaatactttttagagaggtgaaagtttggaaatatttgaaacaattcttatatttatagctgttgtgatactaagttcgtttgtccatactttcatacctaaagtacccctagcatttatacaaattttcttgggcatgttactatttattaccccaatccctgttcaatttaattttgattctgaattatttatggtaacaatgattgcgcctttgttatttgtagaaggtgttaatgtttctagagtccatttaaggaaatatattaagccagtgatgatgatggcattaggattagtcattactactgtgataggtgtcggtttatttattcattggatttggccagatttacctattggagcagcatttgcaattgctgccattctttgtcctactgatgcagtagcagtgcaagcaattactaaaggaaaggtcttgccaaaaggagcaatgacaattcttgaaggtgagtcattattgaatgatgctgctggtattatttcatttaaaatagctgttggagtattagttacaggtgctttttcacttgttgatgctgttcagttgtttttaattgcatcaattggtggcgcagtggttggtttacttataggtatggcattagtaaggttccgattaacattgatgcgtcgaggatatgaaaacattaatatgtttacaattattcaattgttaacaccatttgttacgtatttaattgctgaattgtttcacgcatcaggaatcattgcagcagtagttgcaggacttgtacatggtttcgaacgtgacagaattatgcaagtacgtacacaactacaaatgagttacaatcatacatggaatatactaggttatgttttaaatggctttgttttttcaatactaggatttttagtacctgaagttattattaaaattatcaaaacagaaccgcacaatttaatctttttaataggcatcactattgttgttgctttagctgtctatctatttagatttgtttgggtttatgtcttatatccttatttttatttagccatcagtccattccaaaaaatgatgactaaaaatgatgatgataatccaacgactgagaaaccaccaaagcgaagtttatacgctttaattatgacgttatgtggtgtgcatggaacaatttctttagcaatcgcattaacgttaccgtattttttagcaggtcatcatgcttttacgtatagaaatgatttattatttattgcatctggtatggttattattagtttggtagttgcgcaagtattattgccattattaacgaaacctgcacctaaaacagtaattggcaatatgtcgtttaaagttgctagaatttatatattagaacaagttattgattatctaaatcaaaaatctactttcgaaacaagttttaaatatggtaatgtgattaaagaatatcatgataaattagcatttttaaaaactgtagagaaagatgatgaaaactctaaagaattagaacgtctacaaaaaattgcttttaatgtagaaacaaagactttagagtctttagtagatgaaggacaaataacgaatagtgtacttgaaaactatatgcgttatgctgaaagaacacaagtatatagacaagcatcattaataagaagaatgattgtattattacgaggtgctttattaaaacgaagagtacaaacgagagtgaactcggcatcttcacttagtgttacggataacttaatggaattaaataaaattaataaattagtccattataatgtggttagtcgtttgtctaaggaaacaacaaaagataatacacttgaagttggaatggtttgtgacggttatttaatgcgaattgaaaacttaacaccatctaatttcttcaactcagcaagtgaagatacgattactaaaattaaattaaatgcattgagagaacaacgtcgcattttacgtgagttgattgatacagatgaagtatcagaaggtacagcgttaaaactaagagaagccatcaattatgatgaaatggttattgtagatagtatgacgtagttcgtaattatgctaaaagggattgatgaaaaactgaatggcttttcatcaatcccttttatttaggggaattgaatagatagttttaatttttctctgtatgaacagctgtttttaataatatagatgaaaccattgctaatatcatagcaacaacaattgataagttgaactgattatcgatagaaaataatataccaccaattaatgatcctaatccgattcctaaatttaatattgaaatatcatagctcaatatttgacttggatcgccttttaaaaatttaagtaaagcatattgaactgttggatttgttccccaatgaaataaattccatgtaaatatagataaaattaaaagtatgacattttgtccagtcaataagatgctcataatagaaataatatagacaattataatgatatttccagcaatcctatagcctttcttttcagttaaattatttcctaattttgaacctaaaacacctgcaatacctgagaaaaataaacacaaacttactatccagatgctatgacctttactttttactaaaggctctatatatgtaaataacatgctattagatatcatcatgattaataaaaagcccaacatgattaatgtgcctctgaaatttactaattggtatttagaatgattattaatactataatgtgatttattcgggataaataacataatacctagtagacataaaaaagtgataatcgcaatgatataaaacggaatcttccaattgtaatgggaagcaattaatgtacctatgggtataccaagtatatttgctgcactaaagcctacgtatatgttagcgataactgatgctttgtattctactggaacaatatttgctccagtagacattaattttacagtgattaatgaagcgatgcccgccataaagattctaacaatacatagaaagaaataattggtcattacagttgtaagcatgctgaaaataataaaaagtattaaacaggatactaataattttttgtcattaatttgactagttacctttgttaagagagggcttagaattgaaaaagcaacagcatacaatgttaccaactgacctattaaagcattacttacatgaaattctttactcatttcatttaacattcctacaacaattaagtctgaaacaccaacaataaacattgtgaaaaagccaatcaaagttacaattttaatatttgacatatcttactcctcaaaattaagttctttaacattattaattataaaatttggattttcagtgtttaatacttcaatactatgacttccccaagttacagcacaagaatcaatattggcatttttagccattttaatatcaaaaacagcatctccaacatatatagtgtctttgttatgtaagtcatatttttgtaatatatatataattccatcaggagaaggtttataattcgttactttatctgaaccaattacttcaacaaatagattatcaacacctaatttagaaagatttctttctaatacatttgtttttttactagaaacaacgaataacttatggttttgatgaagtgttttgagctgttcttgcattccgtcatatatttttaaatgttttgcttcagtttctttataattttctctaaacaatgtcattagttcggtgagttctttgtcatttagcttaaaatcactcattaaattaaaagatttttcaatcggaatacccatataatattctatttgttcatcgctaggtatattcaaacctcttttttgtggccatgtacaccaaaaacacagggaaaaccttgagattgaattacttcttgagaagtgttgatttcagcttctaactatgcatgtgagttcttagaattttttatttcactttgcaaaagcaacattttatcacctcaaaatagtatcgattaatttatattctatataaattaattaaatattgcaaattaattttatgtaaacttaattaaagggatttgaaggtgttgttaacatttgagatttaattgaaataagttttaaaaattggaggagatagattaatcgaagtcatttaaagatgaagataagtgcattcacaaaaaatagccacactcatatgacatcggatgagtgtggcttaaggatctatggggggaggaaaccatagatgtttactttgataggccagattaaatatcaaagtatgcgattatttatagcttgatgcaaaagtggtatgcctattaaaagttactgcacatagcttttaatattccgttcaaaggaaaggggcatacaattgaacaatctgtaatagtacttttaaccagctatgctaaaagtctagtagggagaacagttgtccaatcgcataagaacctctaacttcgttagtacgattaagaaaagctttttagttagtatgtaatacaatttattgacgcgcgtgaatctcttttataagagtgtgtagggaatggcgttgtataaattgtattagaagaacttctaacgcatctctgtggttaaaagagatgaagggaacgacagtttaattaaaaacacataaagcttttaactttactctttgatttaaagagtgacaaatgtttatagtttaattaaaactgcataagaacttctagcttttctctttcgctcaaagagaagttctaataccaccatatcgtgcgatcgggaacggtatatatattaataggagggtaatatatatttaacgcacgatatgggactattagccttcgactttgttatgttgatgtgtggcctaaaatattggagataccaatattttaggttgcatcaacatcaattcatcttacttcattaaaacacagcgtgttatttcatgcttccgtgtacagtttcaatatttgatttcatcattttgtagtaagagtcacctttagtgccttctttaccgattgaatctgtgtacacttcaccaaagatatctttcttcgtttcttcagataaactttccattgctttcttatcaacacttgtttctactaataagtgttttaatttgtgctttttaacaaactcaatagcttgtctcatttgttctggtgtaccttgtttttcagtgttaatttcccaaatataacctggtgtaataccgtattgttttgagaagtacttgaaggcaccttcacttgtaatcatggcacgttgttcttttggaatgtcattaaatttgtctttactgtcgttatttaatttttccaattgagcaatgtatttgttaccttgcttttcataatctgctttatgttttttgtcgttatcgataaatgtttgttgaattgtttttacgtatttaataccgttatctaaacttaaccatgcgtgtggatcttgtttatctttgttgccttcttcaccgtttaaatagataggtttaacatcttttgatactgcgataacttttttatcttttaatgatttaccagcctgttctaaggctttttcaaaccaaccgttaccagtctctaaatttaatccgttgtataaaataacgtcagcgtcagttaactttttaatatctttaggtttaacttcatattcatgaggatcttgaccaacaggtacaatactatgaatatcgacgttgtctccaccaacatttttagccatatcatataaaattgaattcgtcgttactacttttagtttgccatttgacttatcactgctttgtttaccaccagtaccacatgcagcaactaaaagtaataaggctaataataaaggtactaattttttcatgttaaacttcctcgtttctttctattcgtaaattttgtgaaaaataatgtgatgatataaattacaaacgtacaaagtacgattgttgcaccactaggaatgttgtaaatatagctgtaataaagtccgacaattgaacttatgacacttattaaacttgctataatcatcattgagtatagttttttactaattaaaaatgctgtagatgcaggtgtaattaataatgcaactacaagaataatacctaccgtttgaatacttgctactgttactaatgagagtaacaacatcacaaagtaatgtaataacgtcgtatttagaccactcattctactaaaagttggatcgaatgtagaaatcattaatggacgatagaaaataatgattagaataaggacgattgaaccaatcactatagttgttaaaaatgcactatttgtgattgccagtaaattaccaaacagaatatggtacaaatctgtcgtagtgtttattaagctaataataataatccccgaagctaagaaagcggtaaaactaattccaatagcggcgtcaggtttcgttttactactagatgtgatataaccgataaaaatacttgcgatcataccagttataagtgcgcctacaaacattggaataccaaataagaatgatagggcaacaccaggtaatactgcgtgactcattgcatctcccattaatgaaagaccacgtaatacaattaaactaccaactgtaccacaaactatccctacaataattgaagttatcaatgctcgattcaagaattgatatgtaaataaatgttcgacaaactctaacatgttatattgctcctttgactagggtcactacagtcagtgctactcataaatgtttcgtttaagcgagtgacactcatagcctcttcactatcaccaaagtatcgtaatgtttgatttaatagaataatgcgatcaaagtattgctttgcttttgataaatcatggtggatgataagaataagttttccttgttgttttaagttctcgatttttgtcatgattaatttttcactactaaaatcaattccgacaaacggctcatctagaaaataaacttcactttcggacatcaatgctctcgctactagcacacgttgtaattgtccaccacttaattctgaaatttgtcgatgacgtaaagattctaattctaaatcgcttaataactgtttgagtttatcccttgctgatttattaggtcgtctaaaccatccaatttctttgtagcaacctgataaaatcacttgttccacacttataggaaaatctaaatcaatatgtgctttttgtggaatatatgtaatatgttgcagttgttgttgtataggtttgttatgtaacaatttagtaccggtagcattaaattcaccaattaaagacttgataagggaagatttaccagcaccattcgggcccatgataccaattatttcgccgcgtactggtatcgataaggaaatgtttttaagtacatgcttattacctaaaaacagatttaaatcttttgtttctaacaaacgtttatacctcctaattaaaagtttaggctaacctaattaattgtataataaactgagaatatttatcatgtcaagtaaattcgtgatataatatagacaatgtatgtgaggtgaaagtatgttaactgaagaaaaagaggactatttaaaggcaatccttacgaataatggcgataaaaattttgtgacaaataaaatcttatctcaatttttaaatattaagcctccatctgtaagtgaaatggtaggacgtctcgaaaaagcaggctatgttgaaacaaaaccgtacaaaggtgttagattaacagaggatggtttaacgcatacgcttgatatcattaagagacatcgactattagaattatttttaatagaaatattgaaatataattgggaagaagtacatcaagaagcagaaattttagaacatcgaatttcagatttatttgttgaaaggctggatagcttgttaaatttcccagaaacttgcccgcacggcggtgtgattcctagaaataatgaatataaagagaaatatataacaacgattttgaattatgaacctggtgatatcgttacaatcaaacgtgtgagagataagactgatttgctaatatatttgtctagtaaagatatctctattggtaatgaagtggaaattgtatcgaaagatgaaatgaataaagtaattatcatcaaacgtaatgataatgtaattattgtcagttacgaaaatgcaatgaacatgtttgctgaaaaataaaataaagaagccataaagatatccatgattgtactgataaagacatatggataattgctttaggcttcttttttattagttaatttatcaagtgagtatatttgagtaaaatattcactgcataaagattgaagataatccagattgtactataaatgaagataggtacatgactgagttctttaagtgcactaccatcccactgtggactcggacgctggaaagtcaatttagcaatcgtccaactagattgtagaacttcgcctaataatacacctaaaatatattgataactcattgtgacaagtagttgaatttctactatattttcatcttttaatataaaatacaacatgatagaaattaaagttataacaacaatgggtgagccttttctagatgttaaaattaaaaaataaataaatatcaataaataggtaaatataaagaaactaggtatctgataatggctcgacgctagaccaatcaataacataataggtggcataaaataaccaccaatcgttgtaagccattggcctgctagatgtctagattgtgtaattgcgaatccttgttgtaatgtctgttgtcgctctcgtgggcttgttacaatgactaaatcttttgcacggccaccagcgagtttattaaacagtacatgaccaaattcatgtgttaaaacagggatatagtttaaaatgacatctaaatagttcaaaacaggcttatgtctatattgatgaatagcaatataacaagctgcaacaataacgataatgtatatattaagttgaattgtcgtattaaaaaagttggataaataattcattgttaacctcatataagatattaatttaaagtttgcttatcacttattataaatgatattggcatcaatagcgttagactttagacttaccttagttaaactaattttaatttttgaaaaggtgaatatgtgttaaaataaagcaaaatcatttcgatataaataggatgaatataaatactgttaatattgattacactaacataataatgaaataagataggagattcctgttatgactgttgaagaaagatccaatacagccaaagttgacattttaggggtcgattttgataatacaacaatgttgcaaatggttgaaaatattaaaaccttttttgcaaatcaatcaacgaataatctttttatagtaacagccaaccctgaaatagtgaattacgcgacgacacatcaagcgtatttagagttaataaatcaagcgagctatattgttgctgatgggacaggagtagtcaaagcttcgcatcgtttaaagcaacctctagcgcatcgtatacctggtattgagttgatggatgaatgtttgaaaattgctcatgtaaatcatcaaaaagtatttttgctaggggcaactaatgaagttggagaagcggcacaatatgcattgcaacaaagatatccaaacatatcgtttgcacatcatcatggttatattgatttagaagatgagacagtagtgaaacgaattgaactgtttaaacctgattacatatttgtaggtatgggattccctaaacaagaagaatggattatgacacatgaaaatcaatttgaatctaaagtgatgatgggcgtaggtggttctcttgaagtatttgctggggctaaaaagagagcgccttatatctttagaaaattaaacattgaatggatatatagagcattaatagattggaaacgtattggtagattaaagagtattcctatatttatgtataaaatagccaaagcaaaaagaaaaataaaaaaggcaaaatagtcatgatgacaaaataaaaccgaggaaatccttaaatggagattctcggttttttcggtttatttaataacgaagcgggactcatcgagtttgtttctaaattctttttgttcggctttggatttctttttaaaatcgtttaggaaagcttcatatttaggtaatacatcatcaagttcaccgtaatcttttaactttccgccttcaatccaagcaatcttagtacaaaattgtctcacttggcctaagttatgactaacgaaaaagatggttttgttttgctctttaaactcgtaaattttatctaaacatttttgtgcaaaagtttggtcacctacagataaagcttcgtcaatgactaagatatctggattaactgtgatattaattgaaaaaccaagttttgcacgcataccacttgaatactttttaactggttgatagataaactcaccaagttcactaaattcaataatcttaggtgtcatcgctttaatttctttacgcttaaagcccatacataacattttaaattcgatattttcaatccctgtaagttgtccactcaagccagcactaattgcgataacgctgacttcaccattacgatccacttttccaacagtaggcgacaatgaacccccaatgatattgctcaacgttgatttgccggaaccattgatgccaacaagccctatgacgtcaccttcatatgcttttaaactaatgtcatctaaagcgaaaaatgttttgtttttatgtttgggaatgagcgcatctttcatacgttctttatttgtacgataaatacgatattcttttgttacatttttaatgtttaccgaaacgttcatttgtagaccttccttattcacatttatctagattataatatactactcaacagttgttaaattttaaaacctgttgtaaagtgtatagaagattttgttattatcagagttggtgttttgacacaaaatgttaatcatcaatgataacaatgatatttaaaaactaaacttatttcaacttacatgattgtatactataatgtatttgtaataaactaatattttaaagaactagacaataattttgatagcatccatgtatagtgatagtatttacaacaattattataatactatttagttaagtagagaaatagttaaacatttgaaagtgtggtttaatggaatgtcagcaataggaacagtttttaaagaacatgtaaagaacttttatttaattcaaagactggctcagtttcaagttaaaattatcaatcatagtaactatttaggtgtggcatgggaattaattaaccctgttatgcaaattatggtttactggatggtttttggattaggaataagaagtaatgcaccaattcatggtgtaccttttgtttattggttattggttggtatcagtatgtggttcttcatcaaccaaggtattttagaaggtactaaagcaattacacaaaagtttaatcaagtatcgaaaatgaacttcccgttatcgataataccgacatatattgtgacaagtagattttatggacatttaggcttacttttacttgtgataattgcatgtatgtttacgggtatttatccatcaatacatatcattcaattattgatatatgtaccgttttgttttttcttaactgcctcggtgacgttattaacatcaacactcggtgtgttagttagagatacacaaatgttaatgcaagcaatattaagaatattattttacttttcaccaattttgtggctaccaaagaaccatggtatcagtggtttaattcatgaaataatgaaatataatccagtttactttattgctgaatcataccgtgcagcaattttatatcacgaatggtatttcatggatcattggaaattaatgttatacaatttcggtattgttgccattttctttgcaattggtgcgtacttacacatgaaatatagagatcaatttgcagacttcttgtaatatatttatatgacgaaaccccgctaaccattaataaatggaagtggggttcatttttgtttataatttaagtaaataacatattaagttggtgtattatgaacgttttaataaagaaattttatcatttggtagttcgaatactttctaaaatgattacgcctcaagtgattgataaaccgcatatcgtatttatgatgacttttccagaagatattaagcctatcatcaaagcattaaataattcgttgtatcagaaaacggttttaacaacaccaaaacaagcgccttatttatctgaacttagcgacgatgttaatgtgatagaaatgactaatcgaacactggtaaaacaaattaaggctttgaaaagcgcgcagatgattattatcgataattattacctattactaggtggatataataagacttctaatcaacacattgttcaaacgtggcatgcaagtggtgcgttaaaaaactttggcttaacagatcatcaagtcgatgtgtctgacaaggcaatggttcagcagtaccgtaaagtttatcaagcgacagatttttacttagtgggttgtgaacaaatgtcacaatgttttaaacagtctttaggtgcaacagaagagcaaatgttgtattttgggcttccgagaattaataaatattacacagctgatagagcaacggttaaggcagagttaaaggataaatatggaattacaaataagttggcattatatgtaccaacatatagagaagataaagcagataatagggctattgataaagcttattttaaaaaatgtttaccaggatatacactgattaataaactacatccatcaattgaacattcagacattgatgatgtatcttcgatcgatacgtctatattaatgttaatgtcagatataattattagcgactatagttcgctgccaatagaagctagcttgttagatattccaactatattttatgtgtatgatgaaggaacatatgataaggtgagaggcctgaatcaattttacaaagcaataccggatagctacaaagtgtatactgaagaggatttaataatgacgatacaagaaaaagaacatctattaagtccattatttaaagattggcataagtataatactgataaaagtttacatcagctcacagaatatatagataagatggtgacaaaatgaggcttacgataatcatacctacatgtaataatgaggcaacaattcgacaattgttaatctctattgagagtaaagaacactatagaatcctttgtattgatggtggttctactgatcaaacaattcctatgattgaacggttacaaagagaactcaagcatatttcattaatacaattacaaaatgcttcgatagctacgtgtattaataaaggtttgatggagatcaaaatgacagatccacatgatagtgacgcatttatggtcataaatccaacatcaatcgtattgccaggtaaattagataggctaactgcagcattcaaaaataatgataatattgatatggtaatagggcagcgagcttacaattaccatggtgaatggaaattgaaaagtgctgatgagtttattaaagacaatcgaatcgttacattaacggaacaaccagatttgttatcaatgatgtcttttgacggaaagttattcagtgctaaatttgctgaattacagtgtgacgtaactttagctaacacttacaatcacgaaatacttgtcaaagcgatgcaaaaagctacagatatacatttagtttcacagatgattgtcggagataacgatatagatacacatgctacaagtaacaatgaagattttaaaagatatatcacagaaattatgaaaataagacaacgagtcatggaaatgttactattacctgaacaaaggctattatatagtgatatggttgatcgtattttattcaataattcattaaaatattatatgaatgaacacccagcagtaacgcacacgacaattcaacttgtaaaagactatattatgtctatgcagcattctgattatgtatcacaaaatatgtttgacattataaatacagttgaatttaatggtgagaattgggatagagaaatatacgaattgtggcgacaaacattaattcaagtgggcattaataggccgacatataaaagattcttgattcaacttaaagggagaaagtttgcacatcgaacaaaatcaatgttaaaacgataatgtgtacattgatgaccataaactgcaatcctatgatgtgacaatatgaggaggataacttaatgaaacgtgtaataacatatggcacatatgacttacttcactatggtcatatcgaattgcttcgtcgtgcaagagagatgggcgattatttaatagtagcattatcaactgatgaatttaatcaaattaaacataaaaaatcttattatgattatgaacaacgaaaaatgatgcttgaatcaatacgctatgtcgatttagtcattccagaaaagggctggggacaaaaagaagacgatgtcgaaaaatttgatgtagatgtttttgttatgggacatgactgggaaggtgaattcgacttcttaaaggataaatgtgaagtcatttatttaaaacgtacagaaggcatttcgacgactaaaatcaaacaagaattatatggtaaagatgctaaataaattatatagaactatcgatactaaacgataaattaacgtaggttattataaaataaatataaaacggacaagtttcgcagctttataatgtgcaacttgtccgtttttagtatgttttattttctttttctaaataaacgattgattatcatatgaacaattagtgctaatccagcgactaggcatgcaccaccaatgatagtgaataatggatgttcttcccacatacttttagcaacagtatttgccttttggataattggctgatgaacttctacagttggaggtccataatctttattaataaattctcttggatagtccgcgtgtactttaccatcttcgactacaagtttataatcttttttactaaaatcacttggtaaaacatcgtaaagatcattttcaacataatatttcttaccatttatcctttgctcacctttagacaatatttttacatatttatactgatcaaatgaacgttccattaatgcattccccatcatattacgttgcttctcgccaccaaggtttttatagtctcctgcacccatgataacttgattaattctaaatttacctcgtttagtagtaatcgtatggttgtaatttgctgtatcacttgatccagtttttaaaccatctgtaccaggcaaactcatttttgcaccttccaatgaaaagttgaatgtgtaatacgtaactgcatgcgttgttggtgctaactgctttgtaaagtctaatattttaggtgtctctttaatcacgtgtaaatctaaaatggcgtagtctctagcagtcgttacagtacgttcttggtctttatattttgttggtgcaaatgtacgtaatcttgaattttcagcacccgttggattgacgaaatgtgtatttttcattccgatagctttagctttgttattcattaaatcaacgaaatcgctggtgttttttgataccttcttagctaaaattaatgccgcggcattactagaattagatactgtaatttgtaataggtctgcgattgtccatacttgtccaggatatagtttcgtattactcaactcaggtagtgtagacataatatattctttgttcgtcattgtgactgtgtcatcaagtgaaagctgccccttatttacagcttccaatgttaagtacattgtcattaatttagtcatagacgctggattccacttagtatcgatattgtattgatacagtaattgtccagtttgactaacattaacagcactcgtcggttcgtatgcagccgacaaacctgcataaccatattgatttgctgcttgtacaggggttacgtcactgttagcagcttgtgcatatggtgtcataatacttaatgttaaacataaaatgatgataatagatattaaatttttcataaagcgttaatcttcccttttccaattcttaaatattccctaaaagcaatggtcattcctacttacggaaatcattgctaattcacttcaccttaattaaattgttgaaaattaagtttcttgcggtttatttgaaaaataatgcaaatatattacgtacgtagctaaaggtgttataatgtttgtacgaagagcaaacttactcaaaagtgattaattatcatgttttaatataaaaactttgagaagttattacaaaaaatgcaatagaaatattctatcatataaatgttatgagcggtattttggggcaatactttatttgatttttaaagttttgttgggagaaaatatatgatagaaatgcatgtatctatctaaatgaattaactataaatttcaaacagaagaggtaaaactatgaaacgagaaaatccattgtttttcttatttaaaaaactatcatggccagtgggtcttatcgttgcagctatcactatttcatcactagggagcttaagtggactattagtgccactgtttactggacgaattgtagataaattttccgtgagtcatatcaattggaatctaatcgcattatttggtggtatctttgtcatcaatgctttattaagcggattaggtttatatttattaagtaaaattggtgaaaaaattatttatgcgatacgctcagttttatgggagcatatcatacaattaaaaatgccattctttgacaaaaatgaaagtggtcaattaatgagtcgattaactgacgatacgaaagtgataaatgaatttatttcacaaaagctacctaacttattaccatcaatcgttacattagttgggtcactaatcatgttatttattttagattggaaaatgacattattaacatttataacgataccgatatttgttttaattatgattcctctaggacgtattatgcaaaagatatcgacaagtacacaatctgaaattgcaaactttagtggtttgttagggcgtgtcctaactgaaatgcgtcttgttaaaatatcaaatacagagcgacttgaattagataatgcacataaaaatttgaatgaaatatataaattaggtttaaaacaggctaaaattgcggcagttgtacaaccaatttcaggtattgttatgttgctaacaattgcaattattttaggttttggtgcattagaaattgcgactggtgcaatcactgcaggtacattaattgcaatgatattttatgttattcaattatcgatgcctttaatcaatctttcaacgttagttacagattataaaaaggcagtcggtgcaagtagtagaatatacgaaatcatgcaagaacctattgaaccgacagaagctcttgaagattctgaaaatgtattaattgatgacggtgtgttgtcatttgaacatgtagactttaaatatgatgtgaagaaaatattagatgatgtgtcgttccaaatcccacaagggcaagtgagtgcttttgtaggtccttctggatctggtaaaagtacgatatttaatctgatagaacgtatgtatgaaattgagtcaggtgatattaaatatggccttgaaagtgtctatgatatcccgttatctaagtggcgacgcaaaattggatatgttatgcaatcaaattcgatgatgagtggtacaattagagacaatattttatacggaattaatcgccatgtttcagatgaagaacttattaattatgctaaattagcgaactgtcatgattttatcatgcaatttgatgaaggatatgacacgcttgtaggtgaacgaggattgaaactgtctggcggacaacgtcaacgtattgatattgctagaagttttgttaaaaatcctgatattttgttacttgatgaagcaacagctaatctcgatagtgaaagtgaattgaaaattcaagaagctttagaaacattgatggaaggtagaacaacgattgtcattgcgcatcgtttgtctacaattaaaaaagccggtcaaattatattcttagacaaaggacaggtaacaggtaaaggtacgcattcagaactgatggcatcacatgcgaagtataaaaactttgtagtgtctcaaaaattaacagattaaatttatatatataagtaagcttggagcaagtacagatataccatcgagaaaattaaaatgtggcacattgatggatatagatgttaataaattgcttcaagcttttgtctattttaaatcatgtgagaagttacgacataataattcttaaattaatgaaatcgatattttaagaaaaaaatgctcatggtataatacaagttataagcaaacatacatatattaaatactgtagccacgagtcataattcttcatattttacatagcaatttaactgattttagagtccacggtacagaagtttgatatttcaatgtttctaaatttttaaaaaattaaatcataggtgggtgccaaatgtttttattaatcaacattattggtctaattgtatttcttggtattgcggtattattttcaagagatcgcaaaaatatccaatggcaatcaattgggatcttagttgttttaaacctgtttttagcatggttctttatttattttgattgggggcaaaaagcagtaagaggagcagccaatggtatcgcttgggtagttcagtcagcgcatgctggtacaggttttgcatttgcaagtttgacaaatgttaaaatgatggatatggctgttgcagccttattcccaattttattaatagtgccattatttgatatcttaatgtactttaatattttaccgaaaattattggaggtattggttggttactagctaaagtaacaagacaacctaaattcgagtcattctttgggattgaaatgatgtttttaggaaatactgaagcattagccgtatcaagtgagcaactaaaacgtatgaatgaaatgcgtgtattaacaatcgcaatgatgtcaatgagctctgtatcaggagctattgtaggtgcgtatgtacaaatggtaccaggagaactggtactaacggcaattccactaaatatcgttaacgcgattattgtgtcatgcttgttgaatccagtaagtgttgaagagaaagaagatattatttacagtcttaaaaacaatgaggttgaacgtcaaccattcttctcattccttggagattctgtattagcagcaggtaaattagtattaatcatcatcgcatttgttattagttttgtagcattagctgatctatttgatcgttttatcaatttgattacaggattgataggaggatggataggcataaaaggtagtttcggtttaaaccaaattttaggtgtgtttatgtatccatttgcgctattactcggtttaccttatgatgaagcgtggttggtagcacaacaaatggctaagaaaattgttacaaatgaatttgttgttatgggtgaaatttctaaagatattgcatcttatacaccacaccatcgtgcggttattacaacattcttaatttcatttgcaaacttctcaacgattggtatgattatcggtacattgaaaggaattgtagataaaaagacatcagactttgtatctaaatatgtgcctatgatgctattatcaggtatcctagtctcattattaacagcagctttcgttggtttatttgcatggtaatatgtcgaagagtgactacgataatacattttaactaaaaaagatgtccaggcatgtcgtctattgatataggtgagatgcttggacttttttattattgatataaagatatttaaatatttttaaagttatcgaaattgatgcaatataaaaaccaagtgcacatggtaatacacttggcttttatgggaaatgaatattattgtacatatgacagtaaggactaggtacagtcatagtacttcgagcaaaatttgttttgttattataaacaacacaaaggagataacttctctattgaagaagttaaaaacattatagcagacaatgaaatgaaagtaaattaaaaattcagaatatttttaattattatattgtgagtgatatttattagggaaagctattcttcatataaattagttaaatagtaaatctttgttagaactctttccatagagttgtgacagtatttttgttgtgctactatttttatagtctaataaatatataaaggggatggtttcgtgaataaaacggttaaagatttaatactagttgtcttaggttcatttatctttgctgcaggtgtaaatgcatttattatttctggtaacttaggtgaaggtggggttacaggtttagcaattattttatattatgcgtttcatatttcaccagccatcactaacttcttggtcaacgcagtattgattgccataggttataaatttttgagtaagagaagtatgtacttaactattcttgtaacaattcttatttcaatatttctgagtttaacagaatcatggcaagtagaaactggaaacagcattgtgaatgccatttttggtggtgtaagcgttggactaggaatcggagtaattatccttgcaggcggtacaacagcaggtacaacaattttggcgagaattgcaacgaaatacctcgatgtaagcacgccatatgctttgcttttctttgatatgatcgttgttgcaatttcacttacagttattccacttgataaagtattagtaacagtaatatcactttatataggaacaaaagtgatggaatatgtcatagaaggtttaaacactaaaaaagctatgacgattatttcaactaatcccgacaaacttgccaaagcaatagacgagcaaattggaagaggtttaaccattttaaacggacatggctattatacacgtgaagaaaaagatgtcttatacgttgttatttctaaaacacaagtttcaaaagcaaagcgattaattaaacaaatcgataaagatgcattcctcgtaattcatgatgtaagagatgtctatggtaatggttttcttgcagatgaataaataaatggtaagagcacacatacttaaatagaagtccgcggacaagtttttgaattatgaagacttatctgtggacgtttttattttataaaagtaatatacaagacatgacaaatcgagctatccaatttaaaaagtaatgttagtcaataagattgaaaaatgttataatgattttcatgataatcattatcaattgggatgcctttgaaaattgataatttaaaaatagaaattattttttataaacagaaagaattttattgaaagtagggaaattatgaatcgtttgcatggacaacaagttaaaattggttacggggataacacgattataaataaattagatgttgaaataccagatggcaaagtgacgtcaatcattggtcctaacggctgcgggaaatctactttgctaaaggcattgtcacgtttattggcagttaaagaaggcgaagtatttttagatggtgaaaatattcatacacaatctacgaaagagattgcaaaaaaaatagctattttacctcaatcacctgaagtagcagatggcttaactgttggagaattagtttcatatggtcgttttccacatcaaaaaggatttggtagattaactgctgaggataagaaagaaattgattgggcaatggaagttacaggaactgatacattccgacaccgctcaatcaatgatttaagtggtggtcaaagacaacgtgtttggattgcaatggcattagcacaaagaactgatattatctttttagacgaaccaaccacatatttagatatctgtcatcaattagaaatactagaattagttcagaagctaaatcaggaacaaggttgtacaattgtcatggttcttcatgatatcaaccaagcgattcgtttctcagatcatcttattgcgatgaaagaaggcgatatcatcgctacaggttcaacagaagacgtattaacacaggaaattttagaaaaagttttcaatattgatgttgttttaagtaaagatcctaaaactggaaaacctttactggtaacttatgacttatgtcgcagagcttattcttaattaagtaagttaatatgataaaaaggacaattaacatgacaaatagagagaatccaacgccattgaagtttttatcctatattataggtttaagtatgatactactaatcacactttttatttctacattaataggtgacgccaaaattcaagcctctacaattatagaggctatttttaattataatcctagcaatcaacagcaaaacatcatcaatgagattaggattccgagaaatatagcagcagtaattgtgggtatagcgcttgcagtttctggtgcgattatacaaggtgttactcgtaatggtcttgctgatccggcgctcataggtttaaattcaggtgcttcatttgctttagcattaacatatgcagttttaccaaacacttcatttttaatattgatgtttgctggatttttaggtgctattctaggaggtgctattgtattaatgataggccgatctagacgtgatggatttaatccgatgcgtattattttagcgggtgcagcagtaagtgctatgttaacagcgctaagtcaaggtattgcattagcttttaggttaaatcaaacagtaacattttggactgctggaggcgtttcaggcacaacatggtcacaccttaagtgggcaattccattaattagtattgcgttaatcattatattaacaattagtaaacaacttaccattttaaatcttggtgaatcattagctaaaggtttaggtcaaaatgtaacaatgatcagaggcatatgtttaattattgctatgattctagcaggtatagcagttgctatcgctggacaagttgcatttgtaggtttgatggtgcctcatatagcaaggtttttaattggaactgattatgctaaaattctaccattaacagccttgttaggtgggatactcgtgcttgttgctgatatgatagcacgatatttaggagaagcgcctgttggtgcaatcatttcatttatcggtgttccttactttttatatttagttaaaaaaggaggacgctcaatatgattagttcaaataataaacgcagacaatggatagcactggctgtttttagcattctactatttctaggttgtacttggagtattacctcaggtgaatacaacatacctgtagaaagatttttcaaaactttaattggacaaggtgatgccattgatgaattaatcttattagatttcagattacctcggatgatgattactattttggcaggtgcagcgcttagtattagtggtgcaatagtgcaaagtgtcacgaaaaatccaatagctgaaccaggtatattaggtattaacgcaggtggcggatttgcaatcgcattatttattgcaattggtaaaattaatgctgacaactttgtttatgtactgccgttaataagtatactaggtggtatcaccgctgcattgattatttttattttcagttttaataaaaatgaaggtgttacacctgcgagtatggtattaataggtgtaggtttacaaacagcattatatggtggctcaattacaattatgtcaaaatttgatgataagcaatctgatttcatcgctgcttggtttgcaggtaatatttggggtgacgaatggccatttgtcattgcatttttaccgtgggtgttgattattattccttacttactatttaaatcgaatacactaaatattattcatacgggtgataatattgcacgaggtctaggtgtaaggttaagcagagaacgtttaatattattctttatcgcagtgatgttatcatctgctgctgtagcagtagcaggttcaatttcgtttatcggattaatgggcccgcatattgccaaacgtatcgttggaccacgtcaccagttgtttttaccaattgccattttagtaggggcatgtttacttgttatagctgatacaattggcaaaattatattacaaccaggtggggttccagcaggtatagtcgtagcaattattggcgcaccgtatttcttatatttaatgtacaaaacgaaaaatgtatagtgtcaaaggacacaacttattgctatgaaaggcactttattatatggcttttcatagcattttttatttaatgagtcactcaagactatttacattttcaataatgaaccattaagttatcaagactgtcttatcataaatatattttataacggtatcaggttaattctttatgttagcgcattcatttattctgttttatactatgactgacaataccaaggaggtacaacatgatgaaaaagttaattaataagaaagaaacatttttaactgatatgatagagggcatgttaattgcgcatccagagttagatctgattgctaatacagttatagtaaaaaaagctaaaaaagaacaaggtgtagcaatagtctctggaggtggaagcggacatgaacctgcgcatgctggatttgtagctgaaggtatgctagatgcagcggtttgtggcgaagtatttacatcacctacaccagataaaatattagaagctattaaagcagtagatactggtgatggtgtattactagttgtgaaaaactatgcaggtgacgtgatgaattttgaaatggcacaagagcttgcagaaatggaaggtataaatgttgaaacagttattgttcgtgacgacattgctgtgacaaatgaagtacaacgtcgtggtgttgcaggaacagtgtttgttcataagcttgccggttatcttgctgaaaaaggtcattcattaacagagattaaatcgcgtgtagaagcgttgttacctgaaattaaaagtattggtatggcaattgagccaccgcttgttccaactactggaaaatatggctttgatattgaagacgacaaaatggaaatcggtattggtatacatggtgaaaaaggtattcatagagaagaagtaaaggatattgatcatattgttggaacattattagacgaattgtataaagaagtaactgccaatgaagtcatagtaatggtaaatggtatgggtggtacgccgttatctgaattaaatatcgtaactaaatatattcaacaaaatttggctgcaagaacggttaatgttgctaaatggtttgttggtgattatatgacatctttagacatgcaaggtttttctataactatcgtgcctaataaaccagaatatctggaagcatttttagcaccaacaacaagtcaatactttaaataagcagtgaatatgaataaatatacatttatgaggtggcacaaatgaaagtgaatgatatgaaagcgcgtttattaaatttagaagaaacttttaaaaaacatgaatctgaattaactgaattagatcgagcaattggtgatggtgaccatggggttaacatggttcgtgggtttagtagtcttaaagacaaacttgatgatagctcaatgcagtcattgttcaaatctactggtatggcattgatgtcaaatgttggcggtgcatcaggaccactgtatggctttagctttgttaaaatgtctgcagtcgccaaagatgatatggataatcaagattttattaaactaattcaggcatttgccgaagcggttgaatcacgtgggaaagttactttaaatgaaaagacaatgtatgatgtagtagcacgagcagcagagaagcttaaaaatggtgaaactttaacatttaatgatttacagcaattagcagataatacaaaagatatggtagcaacgaaaggtagagctgcatattttggagaagaatcaaaaggttatatagatccaggtgctcaaagcatggtttatattttaaacgctttgattggagatgaagataatgcctaaaattatacttgttagccacagtaaagaaattgcaaatggtacaaaatctttgttaaagcaaatggctggtgacgttgatattataccaatcgggggattaccagatggttcaattggaacttcatttgatatcatccaagaagctttgactaaattagatgatgatgcattgtgtttttacgatattggatcttcagaaatgaatttagatatggcaattgaaatgtatgatggtaatcatcatgtgttaaaagttgatgcgccaattgttgaaggtagttttatcgcagcagtaaagctgtcaattggcggttcaattgatgatgcattagcagaaatcaaacaatcattttagttaaaatttactaataatgaaaaatgtaaacctttttcaaatgaaactttataaaaaatatgatagtatatatgtaaatgtttaataaaatctggagaaataggaggacattgccatgcaacaccttataaaaaaacatgtattgaatggcgagtttgatttagtacgacaattgatgtccgaaacagattttatggaatttgaagaagcatatatttcaagtgcgcatgaagtagaaagtatgatgttttatacatgtattttagatatgattaagtacgaagaatcatctgaaatgcatgacttagcatttttattgcttgtgtatccactaagtgaatatgaaggtgctttggattctgcttattatcatgcagacgcttccataaaactaactgacggcaaagaagttaaaagtttgttacaaatgttattattgcatgcgataccaacacctgttatttcagataagaaggcttttgatatcgccaagcaaattttaaaattagatcctaataataatgttgctcgtaacgtcttaaaagacactgccaaacgtatggacaacgttgttgttgatataaatgaattacaccaacgtaatgcacgttaattacatttcaattatattagcttaataatagttttaacatttggttgggttgggacatatgttccagccttttttaatacttaaaaactaacgaagtaaacttgtgtgcacaaatggtttttatacaacattttataaatttatacattttaataaagaacatacgatagatagtttaaacctttttaactgagaaattttgatatgtattttcgaaacttaactaaaaatacgtaagtcaagaagcacaattattaatcatttttcctataaaaaagttcgtatgactgcattataaaagcataaatttataatttttttaaatgtcattgaacgtgataatgtgaatggattgagcaattttgaaaaagtgaaaaataacctatgcgacttgcaattaattttcagtacgttataatgcacactgtgcaaaattaaggaggtctattattcacatgatgatgaataaagaagcaacaaaaattggatttgcctacgtcggcattgtagtgggcgcaggattttcaacaggacaagaagttatgcaatttttcactaaatatggcttgtgggcttatttaggtgtcattatatctggttttattttagcttttattgggcgccaagtagcaaaaattggtactgcctttgaagcgacaaaccatgaatcaacattacaatacgtattcggtgaaaagtttagtaaagtctttgattatattttaatcttcttcttatttggtatagctgtaaccatgatagcaggtgcaggcgcaacatttgaagaaagttataacatacctacatggttaggtgcattaattatgacattagcaatttatgtaacattgctattagactttaataaaatagtacgtgcccttggtgtcgttacaccatttttaattgttttagttgtattaatcgctggcgtgtatttatttaaaggtcatgtttcattagcagaagttaaccaagtagtgcctgaagcaagtatctggaagggaatctggtttggtacaatatatggtggattagctttttctgtaggttttagtaccatcgtagcaatcggtggggatactgaaaagcgtacagtgtcaggtgcaggcgcgatgtacggtggtattatctatacagtattactagcattgatcaactttgcattgcaaagtgaatatccaactattaaaaatgcctcaattccaacattaacattagccaataacattcatccgttaatagcaacagtgttatctgttattatgctggcggttatgtacaatactattctaggactaatgtattcatttgcagcacgttttacagaaccgtatagcaaaaaataccatatctttattgttataatgatggtagcaggttatttattaagtttcgtaggatttgctgaattaattaataagttatatacaattatgggatatgtaggcctatttattgtagtagctgtaattattaaatatttcaaacgtaaaaatgcggataaaaaacatattgcttaatatcatatgatggatatccgaaactttacaattgaatcactttgttttaatcttaaaagcaattcgtctctactcttatcgggcgaattgctttttatatttattcagtctattaatatgagcgtctaacaaatagagaggtacgatgtaatgaataaagataataaatggacgatgataactgcgctttttatagcagtaatcagtgtattgttagcatttcatctgaaacaacattatgaccaaactacaaatgagaaccatgctaataaagacaaaattaatattaaaaataaaaatgtgcgcatttatcaaaaccttacatacaatagagtttatcctaacagtaaattagatattattacacctgttgatatgtcttctaatgccaaactgccagttattttttggatgcacggtggtggttatattgcgggtgataagcagtataaaaacccattattagcgaaaattgctgaacaagggtacattgttgtgaatgtaaattatgcattggcgccacaatataaatatcccacaccattaattcaaatgaatcaagcgactcaattcattaaagaaaataaaatgaatttacctattgattttaatcaagtagttattggcggtgattctgctggcgctcaattagcaagtcaatttactgcaatacagacaaataatcaattaagaaaagccatgaaatttgatcagtcattcaaaccatcgcaaattaaaggtgctatactatttggtggtttttataatatgcaaacagttagagaaactgagtttccgcgaatacaattatttatgaaaagttatacaggtgaagaagattgggaaaagagttttaaaaatatttcacaaatgtcgacagtaaaacaatcgacaaaaaattatccaccaacatttttatctgttggagatagtgatccattcgaaagtcaaaatatagaattcagtaagaaattacaagaattgaaagtaccagtagatacattgttttatgatggtacgcatcatttacatcatcagtatcaatttcaccttaataaacctgaatcgatagataatatcaaaaaagtgttacttttcttaagtcgtaatacatcttctagtggtattcaaactgaagagaaaccacaaatagaaaatccgagtaatgaattaccgttaaatccattaaactaatgataaacagtagtaatttattacttaagcaacatttaagatcttcaaattgaaaacgaagaatttaaaacatgtggggctaatgtgtaagtgtctgagatataataaattgttagcggttctttatcatttctgtccccccctattatgatgtgacatttatttacaaactaatttgttttgaacctgaaaataactttttacaactaaatagtcgaaaaacagtgtgtacatgatataataaatttataaattgaaaagaattcaaaagaaaaattaaaatatagattgagcacgaagtgatttgaaataaggttgtgaaagggaatgacaaggtcagcattaaaaccatttaaaaataaacgcgttatggttactggacgtatacatcgtgtgttgtttaaaaattatttagatagacatagcacatttaagccgaatgtaaggatattattaaaagatgtaattgtttcaggtgtttcaatagatcatttatggctatatgagacaaataaatgctatgcattagcaatggaacttattcatcaacgagtaaaatttagtgcgaatgttgtaccgtattacaaaataaatagaaataataatttattcgtacaagattatggaattaagcgtaaaggtaatttagttactgaagaagcttacattcaaaacaatcagtatcaggataaaatatatgaaaaattaccggatatagattttagactcgaagatttttatagtaaggaaaactaaataatataaagcaccactaatcgtagttgatcaattacacattagtggtgttttattttgaatttaaatttgataaatgaataagagtatacgcattcatttaagattagatgacattgataagtatgagtaatgtattaggtaaccattgaattcgttgttatacgattctaatacaagattatgataaaatagctttaattaagaattttagccatcatatagtcatcgtaatatttaccatcgatgaataacttatcttttaaaacgccttcgatttgaaaatcggcacttttaaaaagctcgagggcaggttggttattgagtggtacatttgcttcaattcggtgtatttgattgtttaaacaccaagccataatggcatcaagaagtgcttggccaattccacgatgttgatataatttctttacacctaaatcaattttagcaacatgtttaatgcgttgaaatggtgtcgtattaacaaaggcaaagcctacaagttgttcatcactttcagcaacaaagatgactttatgtggagaagtgatatattcttctaattgtttactagccgatgtgacgctaggatcatattctcctggtgtgtagaacatatacggagattcgtcgtatattttcgctaacattgaaatgaaattttctacatctttgatactaactctacgtataatatgggccataaaaagcctccagtattttgaaattttaaaacatttgctactattataatatatatttaaccaaaaggtagagtaatatgttttttggttacagtttaaaggagtattttagatgaaacctaaagttttattagcaggtggaacagggtatattggtaagtatttaagtgaagtgattgaaaatgatgctgaactttttgctatatcaaaatatccagacaataaaaaaacagatgatgttgaaatgacttggattcagtgtgatatatttcattacgaacaggttgttgccgcaatgaatcaaatagatattgctgtattctttatcgatccaacaaagaattctgccaaaataacacaatcatcagcaagagatttaacattaatcgcagcagataattttggtcgagcagcggctatcaatcaagtaaaaaaagtaatctacatacctgggagtcgttatgataatgaaacaattgaacgcctaggtgcatatggtacaactgtagaaacaacaaatttagtttttaaacgttctttagttaatgtagaattacaagtttcaaagtatgatgatgttagatcaacgatgaaggtagttttaccaaagggatggacattaaagaacgttgtaaaccattttattgcatggatgggttacactaaaggaacttttgtgaaaacagaaaaatcacatgatcaatttaagatatatattaagaataaggtgcgaccactcgcagtatttaaaatagtagaaacagctgatggaataataactttaattttattgagtggaagtttagtgaaaaaatatacagttaatcaagggaagttagaatttagattaatcaaagaatcatcagtcgtttatatacatctatacgattatatccctcgattattttggccgatttattactttatacaagcaccaatgcaaaaaatgatgattcatggctttgaagttgactgccggattaaagattttcaaagtcgattaaaatcaggagaaaatatgaaatatactaaatgatattgggtgatatggatgcaaatactactagtagaagatgacaatactttgtttcaagaattgaaaaaagaattagaacaatgggattttaatgttgctggtattgaagatttcggcaaagtaatggatacatttgaaagttttaatcctgaaattgttatattggatgttcaattacctaaatatgatgggttttattggtgcagaaaaatgagagaagtttccaacgtaccaatattatttttatcatctcgtgataatccaatggatcaagtgatgagtatggaacttggcgcagatgattatatgcaaaagcctttttatacaaatgtattaattgctaaattacaagcgatttatcgacgagtgtatgaatttactgctgaagaaaaacgcacgttaacatggcaagatgctgtcattgatctatcaaaagatagtatacaaaaaggtgatcagacgatttttctatccaaaacagaaatgattattttagaaattcttattactaaaaaaaatcaaatcgtttctagggatacaattattactgcgctatgggatgatgaagcatttgtcagtgataacacattaacagttaatgtgaaccgattacgtaagaaactatctgaaatagggatggacagcgcaattgaaacaaaagtaggaaaaggatatatggcacatgaataatttgaaatgggtagtttattttctgaaatcaagaaagaattggatattttggatactgtttttaaatattcttatgttaggcattagtcttattgactatgactttccaatcgatagtttgttttatattgtttctttaaatttaagcttaacactgatttttcttatattgactttttttaaagaagtaaaattatatagacattttgaaaaagataaagaaatcgaagaaataaaacataaagatttagcggaaaccccattccaacgtcatacagttgattatttatatcgtcaaattttagcgcataaagataaagtggtcgaccaacagttgcaattaaacatgcatgaacaaaccatcacagaatttgtgcacgacatcaaaacaccagtgactgctatgaaattgttaattgaccaagaagagaatcaagaaagaaaacaagcgctattatttgaatggtcacgtattaactcgatgttagatacgcaattgtatattacgagattagagtcgcaacgtaaagatatgttttttgattatgtctcattgaagcgcatggttattgatgaaattcaattaacaaggcatataagtcaagttaaaggtatcggatttgatattgattttaaagtggataatcatgtgtacacggatataaaatggtgtcgtatgattattagacagattttatcaaatgctttgaaatatagtgagaattataatgttgatatttcaacggaattaattgatcaacatgttgcgttaatcatcaaggatcatggaagaggtattagtaaaaaagatatgcctcgaatatttgaacgtgggtttacgtcaacggctaacagaaatgaaacgacatcatccggcatgggtctatacttagtggatagtgtgaaagatcaattaggaatacaattacaagttacttcgactattggaaaaggaacaacggttaaattgatcttcccattacaaaatgaaattgttgagcgcatgtcagaagtgacaaatctgtcattttaaacatgcgttttgttacttagaattgatacatcatgaccacttcaacgatataatcaaatagatgttaattaaatacaaaattgaaggtaagcgtgccaaattgaatataaaggaaatgaagttaagataaatataggagtgttaaagtgacaatattagaagtaaaacaattaacaaaaatatatggcaacaagaaaatggcacaagaagttctgcgagatatcaatatgtctgttgaagaaggtgaatttattgccattatgggaccttcaggatctggtaaaacgaccttattaaatgttttgagttcaattgattatatttcgcaaggttctatcacactaaaaggacacaaacttgaaaagctttcaaacaaagcattatctgatattcgaaagcatgatattggttttatttttcaagaatataatttacttcatacattaactgttaaagaaaatatcatgttaccattaacggttcagaaattagataaggacacaatgttagatcgttatgaaaaagtggcagaagcattaaatatattagacatcagtgataaatatccatccgaattgtctggtggtcaaagacaacgaacatcagctgccagagcatttataacattgccttctattatatttgccgatgaacctacaggtgcactcgattcgaaaagtacacaagatttattaaagcgattaatgaaaatgaatgaagagattaagacgacaattattatggtgacacatgatccggttgcagctagctatgcaaatcgagtagtgatgcttaaagatgggcaaatattcacggagttatatcaaggtgatgatgacaaacatactttctttaaagaaatcatacgtgtacaaagtgttttaggtggcattaattatgagttttaatgagattatatttaaaaatttccgccaaaatttatcacattatgccatttatcttttttcgctaattacaagtgtagttttattttttagcttcgtagcactaaaatatacgcatagcattaacataactgagacatatcccattattaaagaaggatcgcaagtaggtagttactttctattttttatcattgttgcctttttgctatatgccaatgtactatttcttaaacgtcgtagttctgaacttgcattatatcaaacattaggtttatccaaattcaacattatatatatattgatgtttgaacaattattaatattttcaataacagctatattgggcattacgattggtatctttggttctaaaattttattaatgatagtgtttactttattaggtatcaaagaaaaggttccaattattttcagctttagagcagtgtttgagacactattattaattggcgttgcttatttcctaactgcagctcaaaatcttatcttagtattgaaacaatctatttcagaactatcaaagcataatcaggctaagcaaatgaatcataataaaattacatttgaagaagttatactaggaattctaggtattattttaatcatcagtgggtattactactctttacgcattgtacattactatgatgcaattggcgtccttatgtttatattgtttgcgacagtaattggggcgtatttattttttaaaagttcagtatccttggtatttaaaattattaaaagctttaaaaaaggtgtaataagtgtaaatgatgtcatgttttcttcatctattatgtatcgtattcagaaaaatgcattttcacttactgttatggcaattatttcagctattactttatcagtactttgttttgctgctatcagtagagcaactttatcaagtgaaattaagtatacgtcacctcatgatgttacgattaaagatcaacagaaagcgaatcagttagcaagtgaattgaacaaccgaaaaattcctcatttttataattataaagaagtgattcatacaaaactttataaggatgacttatttgatataaaagcaaaggaaccatataacgtaacaattactagtgacaaatatattcctaatacggatttgaaacgtggtcaggctgatttatttgtagcggaaggcgctattaaagatttagtgaagcataagaaacatggtaaggcagtaataggaacgaaaaagcaccatgtggatattaaattacgtaaagatatcaataaaatttactttatgactgatgttgacttaggtggaccgacgtttgtgttaaacgatcaagattatcaagagataagaaagtatactaagccaaaacacattgtttctcaatttggatttgatttaaaacataaaaaagaaatgttagcattggaaaaagcaacaaataaagttgacaaatctattgaaacaagaagtgaagccataagttcgatatcgagtttaacgggaatattgttatttgtaacctcatttttaggaattagtttcctaattgccgtatgttgtatcatatacattaaacaaatagatgaaactgaagacgagttagaaaattatagtattcttagaaaacttggatttacacaaaaagatatggcaaaaggattaaaatttaaaattgcgtttaattttgggttaccattagtcattgcactttcacatgcatactttacatcattagcatatatgaaattgatggggacaacgaatcaaataccgatatttatagtaatgggactatatatttgtatgtatgccatttttgcaatgacagcttataatcattctaagcgtacaatcagacattcaatttaatatatatatagcggctttcagtaggctagtggattaagattcatgagctttactgaaagcttttatttttggatagttataggtccgggcacgacagttttattgtatatgcttcaactttgtaaattgtattaaatgtgagaaaatagaggcataggcattgaaagaaatatgaattaagaatagttagaagaaagataagtgtattttaatatgtaaaagttatgtaataaatattgtatcgttgcaaattttccgagtatgtccatttacaattattagagttttgtagataaaaaattgcctatatatcaagtttttcaaaacaaatgcctaccactatttaaattttatgtaaaagttaagtttcggaattgttaaaaatttgtaaattgaattgtgggattgtaaattttgtgctattttcatataagggcaaatacagtaaattgtttactgtgaggcatttttgaaattaatatcagtacactaaaaatatactgacgattgataataacaaatttgtatcattagtttgtaaattcacttgtcttaatttgaaacaaattataactgaatgtgattggtgacaatcgcttaaatggaggattttaaatgtttagtaagaaaaaagataagtttatggttcaattagaagagatggtttttaacctagatcgtgcagctattgaattcggtaaaatggatttcaatacacatctagatttaaaggcatactcagacaacattaaaacttatgagtcacatggtgacgaattagtacatcaagtaattactgatttaaatcaaacatttatcacaccaattgaacgtgaagatattttatcattatgtgatgcaattgatgatgttttagatgcaattgaagaaacggcagctatgtttgaaatgtattcaatcgaatacacagatgaatatatggctgagtttgttgataacattcaaaaagcagttgcagaaatgaaacttgctgtcggcttattagtcgataaaaaattatcacatatgcgtattcattcaattaatattaaagaatttgaaacaaactgtgatggtattttaagacagtcaattaaacatattttcaatagtgaaacagatccaatcacattaattaaaataaaagatatttatgaaagcatggaagaaattgctgataaatgtcaaatcgtagcaaataattttgaaactattattatgaaaaatagctaaggggagtatatatttatgtcatatataatcatcgtcactatagctgtagttattttctcgctgatatttgactttatcaatggattccatgatacagccaatgcagtagctactgctgtatctactagagcgttaacgcctaaaacggcaattttaatggcagcagtgatgaactttataggtgctttaacatttacgggcgttgcaggcaccattactaaagacattgtcgatccatttaaattggaaaatggattagttgttgtgttagctgcaatacttgcggctattatttggaatttagctacttggttttacggaattccaagttcgtcttcacatgcacttataggttcaattgcgggtgcagcaatcgcatctgaaggctcatttggcgtattacattaccaaggtttcacaaaaattattattgtattaatcgtttcaccgattatcgcattttgtgttggtttcttgatgtattcaatttttaaagttatctttaaaaatgcaaatttaacaagagcgaatcgtaactttagatttttccaaattttcacagcagcgttacaatcattctctcacggtacgaatgatgcgcaaaaatcaatgggtattattacgttggcattgattgttgctaatgtacagaatgatggcagcgttgaaccacagttatgggtaaaatttgcctgtgcgacagcaatggggcttggtactgcaattggtggctggaaaattatcaaaactgtaggtggtaatattatgaaaatacgcccagcaaacggtgctgcggccgatttatcatctgcattaacaatttttgttgcatcatcgctacatttcccattatcaacaactcacgttgtgtcatcatcaatcttaggtgttggtgcttctaaccgagctaaaggtgtaaaatggagtactgcgcaacgaatgatcattacatgggtgattacattacctatttcagcattgttagcaggtttattattctatatacttaatttatttttctaattgaaaattaagctatactgaacttcagtatcacaaatatatggtggtattgaagttcatttttttatgtaaatagacaacctattttatagagtttacatagaatgaccaagacaaagcattttaattaggggctaagttataaatgtattccatggaacataataagttaggtcattaaaatataagtaagcgtaaaataatgatttaacagtttatattcttcaatgaatgaataattaaatagctatcaacttgtttaattaacctaaattgtattggactttatttaatgtaaatttgtatatgtagacgaaaaagcgtaaaatactggtataacaaattaaatcattatatagtcaacttggttgcattattttggtttttaatatattatgcatttaatttaatcaaataggtaggttattattttttacctaactaccattcatacaaaatataaataagtatgatagggaagggtgagataattttttgtaccaaaatgaaaatttttttcaaaaataaaaaactagcaatctcacatgatgtgaattgctagtatatatcagtacaatttatttaattaatggatgaatgcatagctagaaacttctgaagctggaattgtacggtagttcatattgtatggaccatatgtgtaattcatttcagaaatcaagatactaccatcaccattgacacgttcaacataagcaacatgaccatatggaccaggtgtgctttgcatgattgaaccaactgatggtgtgttgtttacttggtaaccatcattagctgcgttaccagcccaatacttagcgtctgaccaatatgtgctaattggactaccagcttgagcacgacggtcaaatacgtaccatgtacattgaccagcagtgtataaattttggtgattaaaagatgatgcattgccattgctacctgttgtagctgttggtgttgtaccacctgatccaccattaggaatttgtaatgtttggttaggcataattaaataaccacgtaagttattggctgccattaattgatcaactgaaacaccatatctgttagcgatgatatttaatgattcaccagcttgtacagtatgagatgatgctgaaccagcttgtggagaagtgtttgacgtattttgtgcatcacttccacctactgagataacttgaccagggaataccaagttgttatctaattggttattttgtttaatactctctactgaagtgttgtatttttgagcaatactccataatgattcaccagattgtactgtatgttgtgtagaagcttgcgcatcatgatgcgttaaaaatgcagctgcaccagatgttgctgttattgcaaatgctaattttttcaaagggactcctccttaaaattaagatttactacttttaaaaattattaagacaatttatatagtaaattaagttttcgttttatattacgctttccatattatcaaaaataagtagctttgtgtggtttgttattatcttgtaatattattaacattttaggatatcggttcatatttttataaatgctgatttgatagtgtataaaagcgttttagtgattttaactaattataaaaaattatattttgtaacattataaaatgtaaaattactatacttgttaaaggttatttcttttgatgaagcaaaatttactgtaaaatttgacgcataaaacgacagtagaaggaggaattattttgtcgcaaaatacaaatcattcatattatcatcaaaaccagcatgctcaagcaataagtaaagtgtggctttattttatgtattattggattatatttggcataggatgctatctaggtcagtttttaccattaagttggcgacaacccttgtcatttggattactgattattattttagcaacacttgtttttgaaagagcgagacggttcggtttaattatttcacatatatacgctgtagtgattggcttattgtcatacgcaacgtttaccacgtatttacaaaatttaggaccagatattttctataaaaatatcgcattagcaatttttgcatttatagcatttggtattattggttatttcttcgttggagatgcatcgagtataggcaagtatttattcgttacattaataacattaattattgcgagtctaattggtatttttcttcaaaatcctattttttatactattattaccgtcgttagtctgttgttatttctactttatactttgtatgattttaatcgtttaaaaagaggtgactattcaccaagagaaatgggatttaatctatttattaatttgttgaatattattaaggatatactttatcttgctaatatgttcagaagataaacagttaaattaataaagaaattcatataaagttttagaataatcaataatgaatatcaactttaaattggagcgattgtcataaattagaaatttagatagggtaatttaaatatattaccttaattgtaaagatattattaatcattgaaatgattaactgctatagttctaaagtaaacaaatcttagaagataaactttaaacaggtgtacttgcctttctaattacacttttattagaaaagtaaagtatagctacgtattaattttaaaatcgaaatattaataggaataagtatagataatataaacaatttaatgttagtttgagctcatctcaaaagtagaatgtgatttaaataagtgtttatttttaaattgaaaatgaatgtaaagctaacaaaagataatagtaatacgttgtagatgtggtcatttaaaattattttgaaaatactaaaaaatagtgtgttttcaattggatagtttaattaaactgactacatctatttttgtaatatttaaatgattgatatataagtttaaaaattacccattatatagttttatttatttttgatttggtattcgtattgtgttaaatttacgtttaattaaataagttaaatattatagggaatgataaaagtggtacttaaatatagaaagaggtaaagttatggcaaaatcatgcttgcatatacttactaataatgaatatgcgacaacgcgttgccaagatggcatagtcttattttggccaattgacggggaaatcgaactacaaaaatttcgtaaaagtaaaataattgaagatgatatatatattattaatcatctggatgtatttagtattaagaataataaaaaaacgatcatgttgtatttgagtagcgattggtttgcggaattaggctttactttctttaattaccactatacagcaaagttaattaaatcatcttataatttgaaatgtttactattaaaattgacttatcgataccttgataatcaacctctcaatgacgctgatgttagaaaattacaggatattattaaaattattgcaaaagaagcaagtatggataaaaagattgcgcaaaatcaatatcgatatgcctattatggtgatttgcgtgacgagctcgaatatatttatcaaaatgtaaatcaacgattgacattaaaaagtgtcgctgataaattatttgtctcaaagtcaaatttgtcatcacaattccacttacttatgggcatgggttttaaaaaatatattgatactttgaaaattggtaaatcgattgaaattctacttactactgatagtactataagcaacataagtgaacatttaggttttagtagtagctcaacttactctaaaatgtttaaaagttatatggatataacaccgaatgaatatcgtaatttatcaaaatttaataaatctataatgcttaatccagagccacttgtaggcggtatggcgcaagaagtaaaagaagtcatattgaattatattgatcattataaaaatcacctaactgatgttatacatattgacgaagacaaatttgaaatacctaagttatttcaaacggttattcaaattaatacttatacagaaatgaaactagttttcttagaaggactttttaaaaccttattgaataagaatagccaagttgtctttttcatcatgccatcgattttaaaaagtaaaaataccatgtccgaagaagaaaagtttacaatcattaaaaccataattgaaagtaatttaaagatagcatttaatataaatgatattgaaacgacttattatgttgaagaagcttttatgaatgttattagacaattatctccaaacgaaataaatcatcataataattacgaagtgcattttgtttttgatttatcattgatggaaattaggacaatttaccgtatgattttaaaactacataacatcatgttaaatgtgaaattaggattgaatattacctgtttatttgataaaccttcagtttttaaatcactagtatcacaaataaagcgacttaaattcgattcgttaataatagataatgcaaatttaagtagcccttatttgatgggggaaagtgatgagttactattgaaaaatattttgcattttaaaaatttaaaacaagttattaacgaattggatatagaacaagaaaagctgatttttctaaatgttgaaaatcataaactgcttaataataaagaacgagatttaagtaatagtgctccattaatttataagacattaagtgcgctgtatcataactttgatggttttggattaaacatttttgataatcatcaaacatttaatgcgatgcatctatatgataaaaatggatttaaaacaacactaggtcttatattagaaaagtttatcgaatatgtctcgaaaccaaaatacgaaaacagttattattctatttttgatatagagaattattattgtctggttatttatgattggcgagtgatagagagcgagacaattatgagcaattttgaagatagtcaagtttatattaatttcaaaaataatattttaaacgataaatatctaattgtaatagaaacgttggatgaaaatagtgggaacattaatcatttgatctctaaagaattaagagataaatatgaatggaaccccagtttactctctaaaattgacaactaccttaaaccggcaatcgagattaaagagcataactttagtaataattccttaaatattaacgttacttttaatgcgttatacataattaaaataggaaaaaaataacaccttgatatgtattgcaaaatttaatttgcatttgttggtaattttgacaacgtattaaaaacaaatgagaaagacaatggcagaaaaatttaagataataatgacagaagcattgtctttatatatttgggggtgcaacattttgaatactgagaaattagaaacattgcttggcttctataaacaatataaagcattatctgaatatattgataaaaaatataagttgtcgctaaatgatttagcagtcttagatttaacgatgaagcattgcaaagatgagaaagtacttatgcaatcatttttaaaaactgcaatggatgagctagatttaagtaggacaaaattattagtttctataagaagactaattgaaaaagaaagacttagtaaagttagatcatctaaagatgagcgtaaaatttatatttatttaaatgatgatgatatatctaaatttaatgctttatttgaagatgtagaacaatttttaaatatttaattgaaattgagtgtcgaaagcgtagaaattgcttatcggcacatttttaatttatacatattttaaaactaagtaacagattgaagaaatcgtagttcaataatgttaattgtgaaaatgtatataatcataaaaaaatcatgtataatatatgttgttaattaaacagttcgaaagcgagatgacattatgggacgtaaatggaataacattaaagaaaaaaaggcccaaaaagataaaaatacaagtagaatatatgcgaaatttggtaaggagatttatgttgcagcaaaatctggtgaaccaaatccagaatctaaccaagctttaagattggtacttgaacgcgctaagacatattcagtaccgaatcatattattgaaaaagcaatagataaagctaagggtgctggagacgaaaactttgatcacctaagatatgaaggatttgccccaagcggatcaatgcttattgttgatgcgttaacaaacaatgtaaatcgtactgcatctgatgtgcgtgctgcttttggtaaaaacggcggtaatatgggtgtatctgggtcagttgcttatatgtttgaccatgtggcaacatttggtattgaaggtaaatctgttgacgaaatacttgaaacattaatggaacaagatgtagatgtaaatgatgtgattgacgataatggattgacaatagtctatgctgaaccagatcaatttgcagtcgttcaagatgcgcttcgtgcagcaggtgttgaagaatttaaagttgctgaatttgaaatgttacctcaaacagatattgagctttctgaagcggaccaagtaacatttgaaaaattaatcgatgcattagaagatttagaagatgtacaaaacgtattccataatgtggatttgaaataatgaaatcagcagaacaatggattgatgaattgcaacttgaatcgcatcctgaaggtggtttctatagagagacaatccgagaagtattgaaagatggacgaagagcgccgtttagtagtatttattttttgcttacagatgacaatatttcgcattttcatcgaattgatgctgatgaagtatggtactatcatgctggtgattctctaacaattcatatgataaatccggatggggaatatacgactgcaacattgggtactgatatccaaaatggagatgtattgcaatatgcagtgcctaaaggaacaatttttgcttcttcaatcgaaatttcaaatacttatagtttagtaggttgtatgtgtcaaccagcatttgagtttaagcagtttgaattgtttaagcaatctgaattaattacacaatatccgcatcttaaatcagtaatcgaaaaatatgctttaaaataaaaagaatcaatgaagtgatttgaaggttgttagtaaacctttgagtcacttcatttttgtatgtattcttgattgaatcagaatagatttggtgcttcagctgattttaatgaaaatagcattaaatgattttgaaaaagataagagtgtgttatttatatttttgaaaaatcacttttatgaagaaatgtgtgtactatctaattaatattgtctattttaagtaaattgaagcgagttgtagtaaaataataataaatattttcatatgattaacaaaaactataaaactgtatcatgacatgacatcatccatgtagttttatataataatgacaaggagttggtgactgtgaaagtaaagtatatagataaacgtcactggcgtcgcctaattgatagggaatacacagaggtaaaagttaataataataggttcaagggtattataggcttagtcacgatgaaaaaggttcgtgatcctttagaggtgacggtagttggacaaaatattattgtcgcagatgacaattataaatggttgcaaatactacctgaaaagaaacgttatagtattactgtaatgtttgataataaaggcaatccattagaatattactttgatataaatattaaaaatataacgcaaaaaggtaatgcgcgtacagtagatttatgtttagatgttttagcattacctagtggtgaatatgagttggtagatgaagatgatttaatgtttgcattagaaagtgagcaaattacaaaaaagcaatttcatgaagcatatatgattgcgcatcaaattatggcagagttagaaaatgattttaaaggattccaaaagaaaatcatgtactgctttaataaaattaatgcaaaggctcaaaaaattcatcaaaagccacaaaataaaactaattttgaaaaaagcaaacaaataaaacctaagcaatataatcaaactaaaaatcaccaacaacaaaagaaaaactaagtaattcaagctgcagccataccaataaaattggtgaaaattattcgttagtaatgaactcttgaatgctcgtagtcatgaaagttcaataattgaataatttatgggggggaaattatgaagattgaagactatcgtttactaataacattagacgaaacgaaaacgttacgtaaagcggctgaaattttatatatatctcaacctgctgttacacaaagactaaaagctattgaaaatgcttttggagtagatatttttatcagaacaaaaaaacaattgattacaacaactgaaggaacaatgattattgagcatgcccgtgacatgttgaaaagagagcgattattttttgacaaaatgcaggcacatattggtgaagtgaatggaacgatatcaatcgggtgttcttcattgattggacaaaccttacttcctgaagttttgagcctatataatgcccaatttcctaatgttgaaattcaagtacaagttggttcaactgaacaaattaaagcaaatcatagagattatcatgttatgataactcgtggaaataaggtaatgaatttagctaatacacatttatttaatgatgatcattattttatttttccgaaaaatagacgagatgatgttacaaagttaccatttatagagtttcaagctgatccgatttatataaatcaaataaaacaatggtataacgataatttagaacaagattaccatgcaactattacagtggatcaagtagcaacttgcaaagaaatgttgattagtggtgtaggtgttacaatcttgccagaaatcatgatgaaaaatatcagcaaagaacaatttgagtttgaaaaagtagaaattgataatgaaccgctgattcgttcgacatttatgagttatgatccgagtatgttgcaattaccacaagttgattcatttgtaaatcttatgacgagctttgttgaagaaccaaaggcgtagtcttagactaatttaaggttagtatttaattttaagatatacggttaaattgaacacagttggatgctaatgcaccaacacagaagctgacgaaaagtcagcttacaataatgtactggggtgggacgacgaaataaattttgcaaaaatatcatttctgtcccactcccataagagcccctaattaataaattaaaaggggactaaaggaatacagttgattgctaatgcaccaacagcaaaagagcccctaattaataaattaaaaggggctctaagaagcggggttatggatatgtttgcagcgttattacaaataaagaattataaactctttgttgctaatatgtttctattaggtatgggtattgcggttacggtcccatatcttgttctttttgcaactaaagatttgggtatgacaacaaatcagtatggattacttctagcatctgcagcgattagtcagtttacagtaaattcaattattgctagattttcggatacgcatcactttaatagaaaaattattattattctcgcattattaatgggtgcgcttggtttttcaatatacttttttgtagatacaatctggttattcatattactatatgcgattttccaaggattatttgcaccagcaatgccccaactttacgcatctgctagagaatctatcaatgtttcaagctctaaagatagagcccaatttgccaatacagtattacgttcaatgttctcattgggctttttatttggtccatttattggtgcgcaattaatcggattaaaaggctatgctggattgtttggtggaacaataagtatcattttatttactttagtacttcaagtgtttttctataaggatttaaacattaaacaccctattagtacgcaacaacatgttgaaaagattgctcctaatatgtttaaagacaaaacgcttttattaccatttattgcatttattttattacacattggacaatggatgtatacgatgaatatgcctttatttgttactgattatttaaaagaaaatgagcaacatgtcggttatttagctagtttatgtgctggtttagaagtgccatttatgatcattcttggcgttttatcatctagattacagactcgaacattgttgatttatggagcgatttttggaggtttattctacttcagcattggggtatttaaaaacttctatatgatgttagcaggacaggtgtttttagctattttcttagcggttcttttaggaattggtattagttatttccaagatatcttaccagatttcccaggatacgcctcaacactattttctaatgcaatggttattggacagttaggcggtaacttattaggtggtgctatgagtcactgggtaggtttggaaaatgtattttttgtatcagcagcatcaatcatgttaggtatgatacttatattctttactaaaaatcaaaaaattacaaaagaggatgtgatatcaacatgacaattgttttatggctacttatcatcgctgccttcatgttagcatttgttgggttgattaagccgattattccttctgttttagtattatgggttggctttctaatctatcaatttggctttcataatcagcatttatcatgggtgttttatgtatctatggcattgctaacaatattaattttatgtgcggactttttagctaataaatattttgtgaatcgcttcggtggttctaagtttggagagtatgcagctttaattggtgtcgttattggatgttttgttttaccgccatttggaattattatcattccatttattttggtattcatagttgaattaatacaaggctattcatttgaaagagcagttaaagtaagtataggttcaatcgtagcatttttaacaagtagtatagctcaagcgagtctggaacataaatccctaaaaaaacagcagtaagataattttcaattagaaaatatcttactgctgttctctatttatacaatacttcgtattgaatggcttcgctttcctagggtgccgtctcagccttggtcttcgactggcactgctccctcaggagtctcgccattaatactacgtattaacatgtaattttactttgaaatactttaaaaaaataagacactttcgtataatttaataaataccactaaactaaattaacgaggtgccttatgtataaaaattataacatgacccaacttacactaccaatagaaacttctgttagaattcctcaaaatgatatttcacgatatgttaatgaaattgttgaaacgatacctgatagcgaattcgatgaattcagacatcatcgtggcgcaacatcctatcatccaaaaatgatgttaaaaattatcttatatgcatacactcaatctgtattttctggtcgtagaatagagaaattacttcatgacagtattcgaatgatgtggttagctcaaaatcaaacaccttcttataaaactattaatcgttttagagtaaatcctaatactgatgcattaattgaatctttatttattcagtttcatagtcaatgtttaaagcaaaatcttattgatgatagttcaatttttattgatggtacaaaagtagaagctaatgccaataggtatacatttgtgtggaagaaaagtattcaaaatcacgaatcgaaattgaacgaaaattcaaaagcattatatcgtgacttagttgaagaaaaaataataccagagataaaagaagatggagatagcgatttaacaatagaagaaatagatttaattggtagtcatttagataaagaaatcgaagatttaaatcattctattcagaacgaagattgtactcaaattagaaaacagacccgtaaaaaaagaactgagattaagaagttcaaaaagaaatttgatgattattccgaaagaaaaagtaaatatgaagaacaaaaatcgattcttaaagatagaaatagcttttctaaaactgatcatgatgcaacttttatgagaatgaaggaagaccatatgaaaaatggccaacttaagccaggatacaatttacaaatagcgacaaattctcaatttgttttatcctatgacctatttcaaaacccgacagatactagaactttaattccatttttaacaatgattcaaaataccttcggttatttaccggagtatattgtagctgatgcaggttatggtagtgagcaaaactatatggctattatagatgattttaataaaacgccacttattacgtatggtatgtttattaaagataaaacgagaaagtttaaaagtgacatttttaacactcaaaactggaaatatgacgaacttaatgatgaatttatatgtcctaataacaaaagaataggttttaaaagatatgcataccgtaataatagatatggttttaaacgtgacttcaaactatatgaatgcgatgactgttcagcatgttctttgaggcaacaatgcatgaagccaaattcgaaatccaataagaaaatcatgaagaattataattgggaatactttaaagcccaaattaatcaaaagctttctgaaccagaaacgaaaaaaatctatagtcaaagaaaaattgatgtagagcctgtttttggatttatgaaggctattttgggtttcactcgaatgtcagttcgaggaataaataaagttaaacgagagctaggttttgtattaatggcacttaatataaggaaaatagtagctcgacgagctgtatattatcaaatacatttaaaaaaagctgatttctatcaaataattaatagaaatcagcttttttacattgcctaagaacttaatgtcccaagctcgtatggttctttatagatgctttattgattaattaataaaaagcttattgcaaaatatgtttttaggtaactgtaatttagtgattttatcattaacagtaccaaattagcatatgatgtaataagctttttgtttataaaaatgtatgagaatgttttttcgaaatatttctttcaatgcgtaatccaataggcataactataaatgaaaatataataaatacccaattgcttacctgaatatatggtccaaaggcaagtaatgattgtggaataaagaatacatagaaaaatcctacaattagtagaatgattgctaaataggtgaatatccatatccaatttgaattgttaaaacactgcagttgaattgttttaaaactaaaccatataaataaaaagacaataaagaatccaacgactactgaaaacgggaatgaaacaaaatataaattacttccacttttttccatgaaaaatcctaaaaatcctttgagaaaactaacaataccaattaatagaacgatgtgctgatatatatatttaaaaatatttttaaatgtttcattaggcatcgcttttagttcttttattgcatgtgcttttgggtcgtgattgaaaaaatctaaggctaataaaccatgttgttctgcgcttaataattgtttaagtatacggttaataattaactctgtatcatgaggattgacgcgaaagtcagagcgcatataagtcatataattctcgaagatttctctatcagtattgcttaatcttaatgatttaacattattttcttttgttaattgcgcagtacttttcattgttactaaagcgctcctttaaaaatgtttaattccaaactaaaatggaaatgattttatagtattaataaggtcaatcatatcatattaaacgcataaatataacgattaatattggagaagaaaatgaggacacttaataaagatgaacataattatatcaagcaaatagctaatatacatgagacattattgtcgcaagcagaatccaactataaatgtactaaactgagtattgctcttaggtacgagatgatatgttctaatcttgaacatacaaatgataaaatttatatatatgaaaatgaaggtcaattaatagcgtttatttggggacattttagtaatgaaaaaagtatggttaacattgaactgctatatgttgaaccacaatttcgcaaactgggaatagctacgcaactgaagattgcgcttgaaaaatgggcaaaaactatgaatgcaaagcgaataagcagtacaattcataaaagtaatttaccaatgatatctttgaataaagatttaggttatcaagtgagtcatgtaaaaatgtataaagatattgattagaattaggattatgttgctaattcatgttaaaattaaaaaagatttaatgacgttaaggagttttatatgaagaaattaatcatcagcattatggcgatcatgctatttttaacaggttgtggtaaaagccaagagaaagccactctggaaaaggatatcgataatttacaaaaagaaaataaagaattaaaagataaaaaagaaaagcttcaacaagaaaaagaaaaattagcagataagcaaaaagaccttgaaaaagaagtgaaagatttaaaaccttcaaaagaagataacaaggacgataaaaaagacgaagacaaaaataaagacaaagataaagaggcatcacaagataagcaatcaaaagatcaaactaagtcatcggataaagataatcacaaaaagcctacatcaacagataaagatcaaaaagctaatgacaaacaccaatcataattgaattgcttacttgttatagatgaaaggtacagcgttttaaaccttattttaagggtatgtattaattaaaatgtggtcatgattgaaacagaacgtaaaaatagacaacgtaattaataaaggagagaaacggcatgcatgaacaagattttagaattttagagggtcaagatattactttgccagaattaggtagagaattagaaaatattacaggacgcacgattgctgattctactggcgaaattaagcgtgtaattgtacatttaccaaactttgagtccgatacagatacttttgttgctacatatcgtttaaaccatcaacaagattttatagatgcaacttttactgcgctgaaatcagatagagcacgtttaaaagaagtgccagttcatgttgaacttataagctatatttctaaatcaaaataaactgctatctaaaacgcaaagttgatcaaaatatcgattttgtgttttttattgagaaattatataggagtgtcaatcgatgatttattgtgaaacagagcgtttaatattaagagactggcatgaagatgatctgttaccttttcaaaaaatgaatgcgaattatgacgtacgtaaatattttccaagtttattgagttatcgtcgttcagaattagatatgagaactatggatgcggttattaaagattatggcattggattatttgctgtagaagataaagagtcccatcaatggataggctttataggtttgaattatattccagaaacaagcgattatccatttaaagaattaccgctttatgaaataggttggcgcttgttgccagaattttggggaaaaggattagcaactgaaggcgcaaaggcaacgttgaagttagcagaacaacatcaaatatacgatgtctatagttttacagcagaagcaaataaagcttcacaacgtgtaatggaaaaaattggcatgacagtgtatgatcatttcgaattacccaatctaagtaagtatcatttattaaaaaggcaagtgcgctattacattaatcttcgaaagtgaaaatttatacataagcgtaacaaacacccctaatattgtttagctgatgataacaatattaggggtgtttgtttattttttaaccttagaatgattaatcgtatgaacgagtacctagaggtttgaaatttaatattgattctattaatgattccttagtgtcgcataacggtgcaagtgcacgatacttaggatcaataaaaccttcctcaatcatatggtcaatcattgtttgtagtggattgaaaaagccattaatattataaatggcaataggcttttcatggatacctatttgagcccaactatacatttcgaaaaattcttctagtgaacctgcgccaccaggagccatgacaaatgcatctgcaagttctgccattttatttttacgttcatgcatagaatcaactaaaattaattcagttaaacgttggcttgtgatttcatgttcatctaacattttaggcatgacgccaatagctttgccaccatgatctaatacaccatcttgaatggcacccataataccaattgaccctgcaccaaatactaattcataaccttgttcagcaaaatatttacctaaatcgtatgctttttgtacatatgaagggtcatgacctttgcttgcaccacaataaactgcgattcgcttcatattaatccagctccttaattcgatgaatgactcttaatagtgatttttcaaacactttttgatcttgctttgtaaaaggtgggggacctttgtggcgaccaccttgttttctaatttgtgcattcatatatcgtttatctaatagttgttgaatatttttggaattgtatatcttcccattatgatgcatgacaattaagactttgtcgactaataaacttgcgagtccataatcttgagtgattacgatatcatctttcgttgataattgaataattttgtaatcaactgcatctggtccatcatcaacatataatgttgatacatgtgggggatataattggttcgaaaaatggctgaagctccgaataattgtcacaaaaatgcctgtctcagttgttaaatctataatagaatcaacaacaggacaagcatctccatcaataataatatgtgtcacaattatgcctctgtattgttttctttattttgttgagaggcgcttttggcaacataatctttatattttttaaatgacttgatgcgtgctttatcagcttcttgttggcgtttttgttcttctttgtgtcgtttttcaatatttttttgtaactttttattcattttagcgatttctttgcgatttttttcagctagtttatcgccttttttctcagttttctcatctaatttattaggtgttaagcctgcttttacttcgtatttttgtgactttttcatatctttaatacgttgtatttcattcttttcgcgggctttttgctcttctttatgacgcttttcgatatttttttgaagtattttattcattttatcagcgtctttacgattttgtttagctaatttttcgccttttttctcaatataggcaggatcatgttctctagcaaactttttaagttcacgcttattttcaaaatcttgttttttatcgccgacatattctttaacatcactcgctgtgttactgattgctgcagatgtttttgaagcaactttacttgtagcatctgtaactttttgtacgtccggatgttgtttgatacgtttacgttcaacaattaacggtaccaatacaattggtaatacattaatcataaatttgatgacttttttcttatccatagatcttgcctccataattactttattaattttacataccctatgatacatcaatataaacgatgagagtagtgaatcacttataagtatttcagatgttttttcaaagaagacaataaaaactgccaatcaagtggttccttaattgacagtctatattttaaaaggaaattaaatacctttaccaatgccaaatccgaagtaaagtatagcaataaagattactaatacaattctgtaaatggcaaatggaattaatttgattttgttaataagatgcaagaatgttttgattgcaattagtccaacagtaaatgcagctaaaaagcctaaaatataaaaaggtatatcagcaatctgaatatcttgataatgttttaataaagataaaccactagccgctaacataattggaacagccataataaatgtaaagtctgatgcagctttgtgatttaatttcattaataccccagttgaaatcgttgaacctgaacgactgaaaccaggccacatagctacagcttgagaaataccgatgacaaatgcttggaaataactgatttgatctactgtttgtggatttttaactttagctgagtatttatcagcaataatcatatagatagcacctacgaataagccaatcataacagttggcacactaaataaatgttcttcgatgaaatcatcaaatagtaagcctaaaatacctgctggcaccatacccactaatacatgtaataaatttaaacgtcttggctttgaacgtctttgttgattgttatctccttcaacatgtttgtgtttaccaatatgtaaaatctctaagaagcgttcgcggaacacccatgctgctgcaaagacggatcctaattggatgacgattttaaatgtaaatgctgattgagaacctaaaaattcagatgattttaaccacatatcatcaactagaatcatatgtccagtagaggaaacaggggcaaattccgttaatccttcgacgatccctaagataataccttttattaattcaatgataaacataatgtacccactttcattactcaatttaatttatttaaatatcaaaattaccatatcatgatagcatattcatttaaagacatgctagttatagttataatactagactaaagatgtatatattcattttcttttacatgtaaaactacaatattttattgagctatttaatttgattttaaggaaaaccttttataataggtttaggtgatataattgtgaaaaaattaacaacaatactgtttcaatataaaatttttccggtattcatgttcttggtcagtactggtctcggcatactcgttataacgcaaaatattttaatagcagattttttagctaaaattataagacatcaatttcaaggtttatggattgtattatttattttattaggtgttttacttttaagagcaactgtgcaatttctaaatcaatggttaggtgatacattagcatttaaagttaagcatatgcttagacagcgggttatttataaaaataatggtcatccaatcggtgaacaaatgactatactcacagaaaacattgatggtctagcacctttttataagagttatttgcctcaagtgttcaaatcaatgatggttccgctcatcataatcattgcaatgtttttcatccatatcaataccgcattaattatgttaataactgcaccatttattcctttgttttatattattttcggtttgaaaacgcgagatgagtcaaaagatcaaatgacttatttgaatcaatttagtcaacggtttttaaatattgctaaaggtttagtgacgttaaagctatttaatcgtacagagcaaacagagaagcatatttacgacgatagtactcagtttagaactttaacaatgcgcattttacgcagtgcttttttatcgggattaatgctcgaatttataagtatgttaggtattggattggttgcattggaagcaacgctaaacttagtagtatttcataatattgattttaaaactgcggcaattgcgattattttagcgcctgaattttataatgcaattaaggacttaggacaagcattccatactggaaaacaaagtgaaggtgccagtgacgttgtgtttgagtttttagaacaaccgaacaataataatgaatttctattaaagtatgaggaaaatcaaaaaccatttattcagttaacagacatatcatttcgatatgatgattctgatagattggtattaaatgatttaaatttggaaatatttaaaggtgatcaaattgcacttgtaggtccaagcggggcaggtaaatcaactttgacacatcttattgcaggtgtttatcagccaacaataggtactataagtataaaccagcgtgatttaaatataggaatacttagtcaacagccatatattttcagtgcttctataaaagagaatattacgatgtttaaagatatagaaaataatactgttgaagaagtgctagacgaagtaggtttattagacaaagttcaatctttcacacaaggcattaatacaataataggtgaaggaggcgaaatgttatctggtggacagatgagacgcatagaactttgccgtcttttagttatgaagccagatctcgttatatttgatgagcctgcaactggtttagatattcaaacagaacacatgattcagaacgttctgtttcaacattttaaaggtacaacgatgattgtcattgcacatagagataatacaattcgccatttacaacgacgtttgtatatagaaaatggaagactgattgctgatgatcgcaatatttcagtaaatataacagaaaatggtgatgacttatgaaaacacgactaaaatttcaagtagataaggatttattgttagctatagttgttggtgtttgtggaagtttagttgcgctcgccatgtttttcttaagtggttatatggtgacacaaagtgcacttggtgcgccactatacgctctgatgattttagtcgttacagtaaaattgtttgggtttttaagagctattactcgatacgtagagcgccttatttctcataaagctacatttacaatgctacgtgatattcgggtacagtttttcggtaaattagtaaatgtcattcctaatgtttaccgtaaactgagttctagtgatttaatttcacgtatgattagtcgtgttgaggcgttacaaaatatttatttacgtgtttattatccaccagtcgtcatcggtttgacagcgctagttacagtaatagtattggcgttcatttcaatcggccatgcgctattgattatggttagcatgttgtttactttactcattgttccttggttaagctcaaaaaaagcacgtactttaaagaaacatgcagctaatgaacaggctcgatttttaaatcatttttatgattataaagctggtatggatgaactacgtcgatttaatcaaattaatcattatcgaaataatttgatggctaaattaaatcattttgataaattacaacttaaagagcaacgctttttaacgatttatgattttatattaaatattattgctatgctttcgatttttggtagtttagttctaggattaattcaaattaatgcaggccaactaaatattatttatatgacgagtatagttttaatggtcttaactttatttgaacaagctgtaccaatgacaaatgtcgcgtattataaagccgatactgaccaagcattgcacgatattaatgaagtgatatctgtaccttctaccaatggaaataaacgccttaatgataagtatgatgcaacgaacatttatgaagttaaggacgctagttttaagtattggaaccagcaaacgtatgtgttgtcggatattaattttaatgttaatagaggcgaaaagattgcgattgtgggtccttctggttcaggaaaaagtacattactacaaattatggcagggttatatcaattagatagtggctctattcgtttcgaaaatatggatatgtttgaaatagatgacaaagataagtttgaagcgttaaatgtcttgctacaatctcaacaattatttgatggtacaatacgtcaaaatttatttaccgatgaaaaagatgaagcggtgcaagcaatatttaagcaattagatttagaacatttggcactagaacgtcaaattgacttagatggtcatacattatctggcggagaaattcagcgtttagcgattgcgaggatgttattaaaagatactgcatcaacgtggattttagatgaaccaacaacggcattagataaacaaaatagtttgaaagttatggatttaattgaagcacatgcagaaacattaattgttgctacacacgatttaactttattgtcacgttttgagaccatcattgtgatgataaatggtaaaatagttgaaaagggaaactatcaacaattactcgctaatcaaggtgctttatggaatatgattcaatataatgcataaaaaaactgcttgataggctaagaaacctttcaagcagttttttaactaacaagcttacgcgtgctaattgtttttctattcttaataaattctaaacattactttaattgtcatgacaaaagttaattatttttcctttgtttcatcaaatgcatgaatgactttacctaataagcgattaagttctttaacttcatcttgagataaagaagaagctgaagcgactttgtcagatgcattacttaattctggtctaatagtttcacttttgtcagtcaagtgaataaatacttcacgttgatcgacttcggaacgttcacgcttaattaagtctacttgttccattcgttttaataatggtgatactgtaccagtatcgagtgctaattcagttacgactttcttgacgtttacaggagattcatcccataaaatagttaagacaagaaattgtgggtatgttagattgtacttcttaaaaactttgttagagtagtagcgattaacttgtctttgagcattgtacaaactaaagcatagctgttcttttaaattatgttgatcagacattaaagttctcctccagacatactatccgtttttttctcttttcggattggtaatcattaaaaagttgattgtttattaattcacaactttctttgattcaatgccatgctaaaattaaagtatgtttaaagtttagaagatatttttgattaaatcaagcaaaaagataatttaatatatatgttatcatttttaaaaataactgtaatagaaaagagaatataaaatgaaaaataataaagatgaaaaaataagaatatccataattaacggatttttgggtagtggtaaaaccacgttactgacacattatattagtgaattattaaaaaatgatgagaaaattaaaatcatcatgaatgaattcggtactgttgatatcgatagcaatagtatttcaaatgaaattgaagtccattcattgattaatggttgtgtttgttgcgatcttaaacaagaacttgtctatgaactaaaagccattgctttaaaaggggacgttaatcatgtcatcatagaagcgacaggcattgcgcatcctttagaattactagttgcatgtcaagatccgcaaatcgttaatttctttgaaaagccaattatttatggtgtattagatgcgactcgatttttggaacgtcatcaatataccgaaaatacagtttcgctgatggaagatcagttgaaactaagtgacatgattattattaataaaattgatcttgtaactgatgacagtattgagaaaattgataagcaattaagtttgatttgtgcaagtattccaacttataaaacaacctatggacaagtttcgttggaagaattggacttacctggtaaagacagagagatatcgtcgcatcatcaccatcatcatgggattaaaagtatgacttacacatttacaggtccgattgatcgtcaattgttttatcaatttataatgaaattatcggaatctgttctacgtttgaaaggttatgtatcatttagagatcaaccaaatgcaatttatgaatttcaatatgcttatggtttaccagattatggaataattggcatgcaattaccattaacgattgttattattggtgaaactttagatacaaatcacatacgtaatcaattggatatgctacaatttacgtaaatcagaaaatgtgttgtttcaatttaacggaaatagcacattaatttcttaatacttttattgtgaatattttgtgacattgagggatggagtggatgagatatggaacaaataatgattaatcactatgttcatttttctaggcttgtacaaggtttttggcgtgcaaatgaatggaagatgactgcgaaagagttaaattattttataaatgaattagttgaacgtgggattacaacgatggatcatgctgatatttatggggattatcaatgtgaatcactgtttggtaatgctttggatttatcacccgaattaagaaataaaattcaaattgttacgaaatgtggtatcattttgccttctaagcaatttgattttacaaatggacatcgttatgatttgagtagtaagcacatcgtgaaatctgttgaacagtcattaatcaatttgaatgtagattatttagatagtctactcattcatcgtccttcaccattgatggatccagaacaagttgctgatgcattaactaaacttgttaaacaaggtaagttgaagtcattcggggtgtcgaattttaatcattcacaataccaattgttaaatcaatatattatgaaagaaagactacatattagcatcaatcaattagaattatcgccatatcacgttgatagtttacaagatggaacaatggattcaatgtatcaaaaccatgttcaaatcatggcttggagtccttttgcaggcggtaaaattttcgacaaggaagatattaaagcgcaacgtattatgaaagttattcaatcaatagctgacaaatatggtgtgagtgacacagctgtgatgatagcatggttagtaaaaataccgcatcgtatcatgccgatacttggaacaagtcagttaaagcgtattgatcaagcaatcgaagggctgcaacttaatttagatgatcagtcgtggtttgacatttacaccgctattatcggacaagatattccgtaaacttatttacttttaaatcataaaggagcatatcatgacaaacgaagataaacgtttcgaacaattaagatttgaacgcaaatttatagttattccgtatgtaatttatgcagtcattgtattactattaaatattttctattctgatttgaaaataacaatgacattattcggacttttctttgcgtataatgtagtcattttgttcatagcatttattaaacattataaacgcacattgttactaagtcttatattaacagtgcttagtggcgcggcattctttggaattatttatgtttatggcattaatcatttttaaatattaaaaagagactatctacaataatctcatttgcattttatctaactaagtttaacttttgcttagaaaaatgatgctatgaggatattcagtagatagtttttttatgatctaatatttaaacctagatatcgttttgtaattaaccgagataactcatcacctagcaatattatttacaaaatatttcgataaatttgtgtattttgcataaatcaaaaaaggatgtttataaaaattgttataattaaattaagattaaacaaaggggtgactgttatgtcagaagtaaaaaaggtagttaaacatgaacaacaaaagaaagaaaagacaaaaaagcaatacaagccattttggattgttatgagttttataatacttatagttgtactattactcccggcaccttcaagtctgccaataatggctaaggcagtactagctattttagcttttgcagttattatgtgggtaacggaagctgtatcatatccggtgtcagcaactttaattattggtttaatgatattacttttaggatttagtccagttcaaaatttaggggagaagctaggtaatccgaaaagtggcagtgctgttttagctggaagtgatcttctaggaacaaatcatgcattatcattagcatttagtggatttgcaacatcagctgtagctctcgttgcagccgcattatttttggctgctgctatgcaagaaacgaatttgcataaaagactagctcttttagtgctatcaattgttggtaataaaactagaaatatagttattggagcaattattgtttcaattgtacttgcatttttcgttccttctgcaacagctagagcaggggcagttgtaccaatcttgctgggtatgattgcagcatttaaagtttctaaagatagcaagttagcgtctttattaataattacttcagtacaagctgtgtcaatttggaatattggtatcaaaacggcggcagcacaaaatatcgtagcgattaattttataaaccatcaattaggatttgatgtttcatggggcgagtggttcttatatgcagcgccttggtccatagttatgtctatagctttatatttcatcatgattaaagtgatgcctccagaaattaatacaatagaaggtggcaaagatttaataaaagaagaattgcataaacttggccccgttagcgcacgtgaatggcgtttaattgttatatcgatgttattattactgttttggtcaactgaaaaagtattacatccgattgactctgcatccattactattattgctttaggtgttatgttaatgccgaaaattggtgtcatgacatggaaacatgttgaaaataaaataccatggggaacaattatcgtgtttggtgtaggtatttcactaggtaacgttcttttgaaaacaggagcagctcaatggttaagtgatcaaacttttggtgttttaggtttaaaacatttacctattatcgcgacaattgcacttatcacgctttttaatatattgattcatttgggctttgcgagtgcaacaagtttatcatcagcgttaatacctgtttttatttcgctaacctctacgttacacttaggagaccagtctataggatttgttttaattcaacaatttgttattagttttggtttcttattacctgttagtgcacctcaaaatatgttggcttatggcactggtacttttactgtgaaagatttcttgaagacaggtataccattgacaattgtagggtatattctagtgatagtttttagtatgacttattggaaatggttaggtttgctttaatttaaaatataaataagaatctaggttattttaaagtgacaaaaagtttaataaaataaaaagataattgaagggtgttttgtttatggcaatagctgtgttattaaatcgaatgtttcgaatggaacacaatccattatttgaatatatttatcaacaaaaagaagacattgatgcatgttattttatcattccggaagaggacatgtcttcagcttctgatttgaaagcacagttttatcgcggtactttgcagcgcttttaccaatcgttgcacgcagaaaagctcacaccttatgtcatgtcttatgacgatatcatttcattttgtaaagaaaacaatatctctgaagtagtgattgcaggtgatattatgagttatcaccttgaagaatatgatattttacatcaacgctctttattcaatgaagcacgcattgccgttactttgatacgtgggaatcattactttaaagcgagtaaaacaatgaatcaacaaggggagccatacaaagtttttactagtttctctaaaaaatggcgaccttacttgaggcatagagacgtatatcactatgatttaaaatcattcgaagacttcgtcattgcatcacctgatgatttagtgtttgatgacatagcatttggatcctcacaaataattgaacagaataaatggcaacattttttagatcaagatatacagaattacgaaagcggaagagactatttacctgaagtgttaacaagtcagctaagtgttgctttagcatatggattattagatattattgaaatttttaatgatttattggcgcgttatgatgaggatgaggcaaactatgaagcatttatacgtgaactcatttttagagaattttattatgtgttaatgacacagtatccagaaacctcataccaagctttcaaatctaaatatcgacagataaaatggtcgcaaaatgaagcggattttaatgcatggtgcgaagggcaaacaggatttccaatcattgatgcagcaataatggaattgacacaaactggttttatgcacaatcgaatgagaatggttgtgtcgcaatttttaaccaaagatttatttatagattggacatggggagaaaaattctttagaaagcaccttattgactatgatgcagcatcaaatattcatggatggcaatggtctgcttctacaggtacggatgcagtgccgtattttagaatgtttaatccaataagacagagtgaacgctttgatcctaaagctttgtatatcaaaacatatcttccgatttttaatcaaattgatgctaaatatttgcatgatacacaacgcaatgagtccaacctttttgaactggggattgaattaggtcgtcattatccaagacaaatggtagatcatcaagaaaaacgtacacaagttttagctgcatttaaagcgctagactaattcggctgaattgatagatcaggcatgagtaaaatctggagcagaatttaaagttcttaagcaatataaataagccaatttctattattgatgtgatagaaattggctttgctcaaatatataagttgtatttagttttcttattaatttggtgttatcttagtatgtccgtaaataaagtgaggtatagtacgacatactctaaaaatgtagcgagatagatatatttcaatctaacttttatgttttgaggcacttgccatttaggatattgtcgttcgtaatacgacacttgttgtataaatacacctagtccaaatggtagcatcatgagtaagatacttcttaaataacttaaaccaatatcatgccatatgtgtccaataatcaattgaaagacaatgatagatactattaaaacgattatatttattgtcacttgttcaaacgcactccttttccaaataatagaattgctgcttgcatcacaaccataaaacatacaaacatagcagttttaagcgttagactttctagaatgtgatttagaacatgtaagggttcattaaagaaataaacggaatgtaagcgtaagaaacgaccaatataaattccgaatccatttaaaaacattagtacgacaacaattaatctattaagccaacggtgagaagtcaatgttagtatttcaaaatagattaaaatcatcacataaaccgctaagaagacaccaagcagtaaataggtaaagtatttccactcacctaaatttagtcctgcgtaaaagttgaattgaaattggttcaaatggattaaatcagttaccatataaaatgtatttggtaaaagtaacacaaatataaaactatatatgataaagagtggccattcatactttttattcggtttgaataatcgtaataatagactaagctcaaaaggtatatatgctaaaaacaaatttaaagtcataaattgaaaaattttagtctcaaaaagggagacgataaataatattaaaaagtaaattctagcgatgtatcgagattgcatcaataataaacactactttctaatgaaaaaagttattcattcaaatgtgatagttataaacgcattcaagtcctaattaaaaatttaatttaactcgttgaagtatattaataaacgagaatgcatttatgattaagcacttatgataacttgtaataaaatttgattcaactaaaaagtaaagtgctattgaagatcaagtaaatttaaaccgactgcatcgttgaatgaacgttgaatgtcccaatcagttacagtaagaatgatttcagcagttgcagaaacaattgctttagcgagatgtccgctaaaagtttcatatgattgagtaccgaaagtagcatgcaaatgtgcaaaatgtccattatctagacgagaaatattacctaataagctcgtcaattctagtggctcagtaatatgtttttcttcatattgtttcgttgttaaattgaaaaattttaaaacgacgtcatcacatgcaccaatgccgctgacagatgtaaatgttaagtcttggtcatctgcaaagtttgttatacattcaacgatatcttctcctttttctaacactagtagtatagtatgattacttttttgcaatttcatatgatcaatcccctttattttaatatgtcattaattatacaattaaatggaaaatagtgataattacaaagaaaaaaatattgtcaaatgtagcaatgttgtaatacaatatagaaactttttacgaatatttagcatgaattgcaatttgtcgtggaaaagaagaataacagatttaagaatgacatggagaaaaaagaggtgagcatatgaataaacagatttttgtcttatattttaatattttcttgatttttttaggtatcggtttagtaataccagtcttgcctgtttatttaaaagatttgggattaactggtagtgatttagggttacttgttgctgcttttgcgttatctcaaatgattatatcgccgtttggtggtacgctagctgacaaattagggaagaaattaattatatgtatagggttaattttattctcagtgtcagaatttatgtttgcagttggccacaatttttcggtattgatgttatcgagagtgattggtggtatgagtgctggtatggtaatgccgggtgtgacaggtttgattgcagatgtttcaccaagccatcaaaaagcaaaaaactttggctacatgtcagcgattatcaattctggattcattttaggaccagggattggtggatttatggcagaagtttcacatcgtatgccattttattttgcaggtgcattaggcattttagctttcataatgtcagttgtattgattcatgatccgaaaaagtctacgacaagcggcttccaaaaacttgagccccaattattaacaaaaattaattggaaagtctttattacgccagcaattttaacgctcgtcttagcgttcggtttatcggcatttgaaacactgtattctttatatacatcgtataaagtaaattattcacctaaagatatttcgattgcgattacgggtggcggtatctttggtgcacttttccaaatttatttctttgataaatttatgaaatacttctctgagttaacatttattgcatggtcattaatatattcagttattgtattagtgctattagttattgccgatggttactggacaattatggtaattagctttgttgtctttatcgggttcgatatgataagacctgctattacaaattatttctcaaatattgctggtgatagacagggatttgcaggtgggttaaactcgacattcactagtatgggtaatttcataggtcctttaatcgcaggtgcgttatttgatgtacacattgaagcaccaatttatatggctataggtgtgtcattagcaggtgttgttattgttttaattgaaaagcaacatagagctaagttaaaacaacaagatttgtaatatcgcacatggttgtcattcgattaatgtatttcgacaactaaagcatttcaaaataagcatcgattttcttacaattatagtgaagaaaagtcgatgctttaaatttataaagattaaaaacttttaaatgttttagtctttatatttaaatgttatatgtaacaaaaaatgattttgagtaataaacatgttacaaatattacattctttttaaattgcaatccacatacctaattcattaacgttaatgtgttaagatgataaaaaatgagtaaggaaatgtgggtaaggggatgacagtaaaaaatttatttttaggctttgttgctgtaatattaaccgtttgtttaattggtttattaatattagcaacaaatgaagatgcgcttgctaaggtacataaaacgattaatacgcttaacgcgataaatgtatcaactgaagatacttataaaaagaaaatggatattctcaatattcatactgctaaagcatctgaagtgaatgaaaatgtgaaaaagcaaaatcattttaagcatcgtgtgaatgcaaataaatcaaattcttttaacgaacaagagtgccaagttattgctgatcgttatgcagataagcatatcaatgataattatggtttagaaagaatttctaagacaaatcatggatataattatgtttattccaatgataattcaacgagtaagcaacatgtaagtatttcaaatcaaggcataataacgaaataatagatggaacagtgtattctaattggatatactgtttttattttgcaatattttaatttaaaaaggtgaaatcaacttataaaatgatgtaaatgttatgtcaaaatcaaccaatccgtaatgtattttaaaatgttaatatagttctgaagaagtataaatgaggtgttgaaatggctaaaaataagaaaactaacgcgatgcgtatgcttgatcgtgcaaaaattaaatacgaagttcatagctttgaggtaccagaagaacatttatctggccaagaagtcgcagaactcatacaagcaaatgttaaaacagtatttaaaacacttgttctagaaaatgcaaaacatgaacattttgtatttgttatcccagtaagtgaaactttagatatgaaaaaggcagctgctatggttggagagaagaaattgcaacttatgcctttagataatttaaaaaatgtaacgggatacattcgtggtgggtgttcacctgttggtatgaaaacattgtttccaacagtcgttgacaaatcctgtgaaaattatagtcatatcagtgtgagtggtgggcttcgaacaatgcaaatcacgatagctgttgaggatttgattacaataactaaagggaaaattggagcagttatccatgaatgattaataacaacaaaaagtatggggcaagattaggagtgcgacagagatgaaatttttataaaattcatttctgctacactcctttttgattgaaatagcattttacgatcataaacagtcatgataattgagtatttgaacataaaaatgtaattttatcgtcacaatttgattgtttgtgattgtttttggtaatttatgattgaaaagtgaaagcgtactcattataatacagagtgagatggggtgatgatgataattacagaaaaaagacacgagttaatattagaagaactttcgcacaaagattttttgactttacaagaattaatagatcgaactggctgcagtgcttcaacaatacgaagagatttatctaaactacaacaattagggaaattacaacgtgtgcatggtggtgcaatgttaaaagaaaatcgtatggttgaggcgaatttaactgaaaaattagcaactaatctcgatgaaaagaaaatgattgctaaaatagcagctaatcaaatcaacgataatgaatgcttatttatcgatgctggttcatctacattggagctaattaaatatattcaagcgaaagatatcattgtggtaaccaatggtttaacacatgtagaagctttacttaaaaaaggtattaaaacaattatgctaggtggtcaagttaaagaaaatacacttgctacgattggttcaagtgccatggagatattaagacgatattgtttcgataaagcttttatcgggatgaatggattagatattgaacttggattaactactcccgatgagcaagaggcattagttaaacaaacagcaatgtcattagccaatcaatcatttgtacttatagatcattctaagtttaataaagtatattttgctcgtgtacctttgctagaaagtacgacaatcatcacatctgaaaaagcattaaatcaagaatcgttaaaagaatacaaacaaaagtatcactttataggagggactttatgatttatacagtgactttcaacccttcaattgactatgtcatttttacgaatgattttaaaattgatggtttgaacagagcaacagcaacatataaattcgctgggggaaaaggtattaatgtctcacgtgttttaaagacattggatgttgagtcaactgctttgggatttgcaggtggatttcctgggaaattcattatagatacattaaataacagtgcaattcaatcgaattttattgaagttgatgaagatacacgtattaatgtgaaattaaaaacaggacaagaaacagaaatcaatgcaccgggtcctcatataacgtcaacacaatttgaacaactgttgcaacaaattaaaaatacaacaagcgaagatatagttattgttgctggaagtgtaccaagtagtattccaagcgatgcgtatgcacaaattgcacaaattacagcacagacaggtgctaaattagtagtcgacgctgaaaaagaattagctgaaagcgttttaccatatcatccactatttattaaacctaataaagatgaattagaagtgatgtttaatacaacagtgaactcagacgcagatgttattaaatatggtcgtttgttagttgataaaggtgcgcaatctgttattgtctcacttggcggtgatggtgctatttatattgataaagaaatcagtattaaagcagttaatccacaagggaaagtggttaatacagttggctctggtgatagtacagttgcaggcatggtggctggaattgcttcaggtttatcgattgaaaaagcatttcaacaagcagtcgcatgcggtactgccacggcatttgatgaggacttagcaacacgggatgctatagaaaaaataaaatcacaagttacgatttgcgtacttgatggggagtgaaaataatgagagtaacagagttattaacaaaagatacgatagcaatggatttaatggcaaatgacaaaaatggtgttattgatgagttagtaaatcaattagacaaagcaggtaaattaagtgatatcgcgtcatttaaggaagcgattcacaatcgagaatcacaaagtacaactggtatcggtgaaggtattgctattccacatgccaaagtggccgcagttaagtcaccagctattgcatttggtaaatctaaagtaggcgtagattatcaaagtttggatatgcaaccagcacacttattctttatgattgcagcgccagaaggtggcgcacaaacacatctagatgctttagctaagttgtctggtattttaatggatgaaaatgtacgtgaaaaattattacatgcatcgtctccagaagaagtgttagcaattattgatcatgctgatgatgaagcgacaaaagaagaagaggcagaagctgaagcacaacaagttgcaactgcagaacaatcatctaaacaatctaacgagccatatgtattagctgtaactgcttgtccaacaggtattgcacacacatatatggcacgtgatgcattgaaaaagcaagcggataaaatgggcattaaaattaaagttgaaacgaacggttcaagtggtattaaaaaccatttaacggaacaagatattaaaaatgcaacaggtatcattgttgctgctgatgttcatgttgagacggatcgcttcgatggtaaaaatgtcgtagaagtaccagtagcagatggtattaaacgcccagaagaattaattaataaagcattagatacaagtcgtaaaccttttgttgcccgtgatggtcaaagaaaaggtaactcaaatgacagtcaagaaaaattaagcccaggtaaagctttctataaacacttaatgaacggtgtttctaacatgttgccacttgtaatatctggtggtattttaatggcaatcgtgtttttatttggtgcaaactcatttgatccaaaaagctcagagtacaatgcgtttgcagagcagctttggaacattggtagtaaaagtgcattcgcgttaatcattccaattttatctggattcattgcacgtagtattgcggataaacctggattcgcttcaggtcttgtaggtggtatgttagcaatttcaggtggttcaggatttattggtggtattattgcaggtttcttagcaggttacttaacacaaggtgttaaagtgatgacacgtaagttaccacaagcattagaaggattaaaaccaacattaatttacccattattaacagtgacagctacaggcttattgatgatttatgtctttaatccaccagcatcttggttaaatcatttattattagatggattaaataatttatcaggttctaatattgtattattaggtttagtcattggcgctatgatggcgattgatatgggcggtccattcaacaaagcggcatatgtttttgcaacaggtgcgttgattgaaggtaatgcagcaccaattacagctgcaatgattggtggtatgattccaccgttagcaattgcgacagcgatgttaattttcagacgtaaatttacaaaagaacaacgtggttcaattatccctaactatgtgatgggtatgtcgtttattacagaaggtgcgatcccattcgcggctgccgatccattacgtgttatcccttcaatgatgattgggtcaggtataggtggcgcaatcgctttaggtttaggttctcgaattactgcgccacacggtggtattatcgtaattgttggtacggatggtgcacatttactacaaacacttattgcacttgtagtaggtacattagtttcagcattaatttatggacttattaaaccaaagttaactgaaacagaaatcgaagcttcaaaatcaatggacgaataacttttatgatttaaaatgattgttagaaatgacgttacatcaatttgtcagtcgattgaatgtatgttaatttaatatatcgtgttaacggtagtttatataaaactattaaaacaccttccattaattcagtttttatgaatggatgcgaaggtgtttttaatttttagtatgtgaatgtagtcattacaaaaataaatatagtttttaaagtttttgcaaaaagttatgccaaacgaagcagatatagtaaaatatgagtgtcttaaagtgaaaatttataaataaagaagggtttatacgtgtcagaattaattatatataacggcaaagtttatactgaagatgacaaaatcgataatggttacattcatgtgaaagatggacagattgttgcaattggagaagtggatgataaagcagcgattgataatgatacgacaaataaaattcaagtgattgatgcaaaaggtcatcatgtattaccaggttttatcgatatacatattcatggtggttatggacaggatgcaatggatgggtcatacgatggcttaaaatatctatccgaaaatttgttgtctgaagggacgacatcgtacttggccactacaatgacgcaatcgactgataaaatagataaagcacttataaatattgctaaatatgaagtggagcaagatgttcacaatgcagcggaaattgtaggtatacatttggaagggccatttatatctgaaaataaagttggtgctcaacatccgcaatacgttgtacgcccatttatcgataaaattaaacattttcaagagactgctaacggactaataaagattatgacgtttgcacctgaagttgaaggtgcaaaagaagcgcttgaaacgtataaagatgacattattttttcaattggtcatacagtggcaacatacgaagaagcagttgaagctgctgagcgaggagctaaacatgtcacgcatttatataatgcagcgacggcattccaacatagagaaccaggtgtttttggagcagcatggttgaatgatgctttacataccgaaatgattgttgatggcacacattctcatccggcatcggttgcaattgcttaccgtatgaaaggtaatgaacgtttttatttaattaccgatgcaatgcgtgcaaaaggtatgcctgaaggagaatatgatttgggtggtcaaaaagtaactgttcaatcgcaacaagcacgtcttacaaatggtgcacttgctggtagtattttaaaaatgaatcatgggttacgtaacttaatatcatttacaggtgatacattagatcatttatggcgtgtaacaagtttaaatcaagccattgcattaggtatcgatgatagaaaaggtagtattaaagtaaataaggatgcagatcttgttattctagatgatgacatgaatgtaaaatctacaataaaacaaggtaaggttcacacatttagctaatagataatcataattaaatgtatgcaatagatttaatctgttaacataagcactttatattatgataaaatagaggcaataacatttttttctgggggtgtctaaatgggaaggcgataacatgtagttgtaatttaagtcatagtgataaatttgaatgcgtgttacccatgagtgacacatataacatggaggtgaatccctagaaatagggaattaattggaaacttcgaccataattagtttgattatatttattctattaattgcattaaccacagtatttgttggttcagaatttgcattagtaaaaattagagcaacaagaattgaacagctagcagatgaaggaaataaacctgctaaaatagtaaaaaagatgattgctaatctagattattatctttctgcttgtcagttaggtataactgtaacatctttagggttaggttggcttggtgaaccaacgtttgaaaagctattacacccgatatttgaagcaatcaatttaccaactgcattaacgacgacgatttcgtttgcagtatcatttataatcgttacgtatttgcatgtagtacttggtgaattagcgcctaaatctatagcgattcaacatactgaaaagcttgctttagtatatgcaagaccattgttctatttcggtaacattatgaaaccattgatttggctgatgaatggttctgcacgtgttattattagaatgtttggtgtaaatcctgatgcccaaactgatgcaatgtcagaagaagaaatcaaaattattattaacaatagttataatggtggagaaatcaaccaaactgaattggcatatatgcaaaatatcttttcattcgatgaaagacatgcaaaagatataatggtacctagaacgcaaatgattacactaaatgaaccttttaatgtagacgaattacttgatacaataaaagaacatcaatttacacgttatccaattactgatgatggtgataaagaccacattaaaggatttatcaacgttaaagaatttttaactgaatatgcttctggaaaaacgattaaaatagcaaactatatacacgagttgccaatgatttcagagacaacacgtatcagtgatgcattaattagaatgcaacgtgagcatgtacatatgagtcttattatagatgaatatggtggaacggcaggtattttaacgatggaagatattttagaagaaatcgttggggaaattcgtgatgaatttgatgatgatgaagtgaatgatatcgttaaaattgataataagacattccaagtaaatggtagagtactattggatgatttaactgaagagttcggtatagaatttgatgactctgaggatattgatacgataggtggatggttacaatctcgcaatacaaacttacaaaaagatgattacgtggatacaacgtatgatcgctgggttgtttcagaaatcgataaccaccaaattatttgggtaatgttaaactatgaatttaatgaaccgagacctactatcggacagtctgatgaagatgaaaaatcagaatagataataatatataaaccaactaagaatgatttaattcatttttggttggttatttttttgactaaaattaatgaaaagtgaaaatagtattggaactcaatatctttaatgaatattttttattgaaagcgataattcgtattaattgagtttgttgaaaaatttagggtaatgtaaagatataaaagatacatagattggagagatataaagatgttgaatgagatacaaatattaaataatggatacccgatgccttcagttgggttaggtgtttataaaatttctgacgaagatatgactaaagttgtaaatgctgcaattgacgcaggctatagagcgtttgatacagcatacttttatgataatgaggcttcactaggacgagcattaaaggataatggcgtcgatagagaagatttgtttataacaacgaagttatggaatgactatcaaggttatgagaaaacattcgaatatttcaacaaatcgattgaaaatttacaaactgattatcttgatttatttctaatacattggccttgtgaagcagatggtctatttttagaaacatataaagctatggaagaactttacgagcaaggtaaggtaaaagcaataggtgtatgtaattttaatgttcatcatctagaaaaattaatggctcaatcaagtatcaaaccaatggtgaatcaaattgaggtacatccatattttaaccaacaagaattacaagaattttgtgatcgtcacgatattaaagtgactgcatggatgcctttgatgagaaatagaggactactagacgaccctgtcattgttaaaattgctgaaaaatatcataaaacaccagcacaagttgtattgcgttggcatttagcacacaatagaattattattccaaaatctcagacacctaaacgcattcaagaaaatatagatattttagattttaatttagaattaacagaagtagctgaaattgatgctttaaatagaaatgcaagacaaggtaaaaatccagatgatgtgaaaattggggatttaaaataactggatgttaaattttacgtttatgaatgccttttaatgtgtacattaaaataaatgagttggtttttactatttgataaaacaatactcaggtacattcaaaatcttttaaataaaaaggatggacatagatgaaaattagagtcgtcattccttgttttaatgaaggggaagtcattacacaaacacatcaacaattaactgaaatactttcacaagatagtagtgtgaaaggctatgattataatatgcttttcatagatgatggtagtacggataccactatagatgaaatgcaacatcttgccacaatagatagacatgtcagctttatttcttttagtagaaattttggaaaagaagcagctatgattgcaggttaccagcatagtactgaatttgatgcagtcatcatgatagattgtgatttgcaacatccacctgaatatattccgaaaatggttgaaggttttatggaaggctatgatcaagtgattgcaaagcgtgatagaagtggtgaaaattttagtcgcaaaacattaagccatttgtactataagttagttaattgctttgtagaagaagtacaatttgatgatggtgttggtgattttagacttttaagccaaagagctgttaaatccattgcatcacttgaagaatataatcgattttcaaaagggttatttgaatggataggatataatactaaagtgtttacgtatcaaaatgttgcgagacaaaaaggagaatctaaatggtcctttaaaaagttatttaattatggtattgatggattgatttcctttaatagtaaacctttgagaatgatgatatatcttggcttatttattttttcaataagcgtgttatatattatctatttattcatcaatattatgatttctggtgttaatatcccaggatatttttcaacgattgcagctattttattattaggcggcatacagttaatttcaattggtgttgtaagtgaatatattggcaggatatattatgaagttaaggcacgtcctaaatacattattcaagctacaaatctttcaagtattgaaaatgatgagaaggatacccataaagtttattctaaataaacaaaaaaagaagccctcattaatgggagcttctttttagtctttgcagtttattttataaataaatcggattatgtcgtaatgtctaatttgtgtaatgttacagtcatcgtagttcctacatctatatcactgcttacactgatttttgcgttattttgttgcgcgagttcattagctatatataagcctaatccagaaccacccgtttttgtattacgagagttttctactctgaatgtacgttcgaatatacgttcttgtagttctggtataatgccaataccttcatcgctaatagcaatgtcgatagtatcttgatctttgttttcactaatattaatatcaatgcgactaccaacatttgaaaattttagcgcattatcaagtaagtttgttaaaatacgctcaagtggcgttcgatattgataaaatgcatcaatttcgctacagaaattcacttctaatgtgcggttttcatgtttgatgcgttgctcatatggttgcaatattgatacaagtaattggtctagttgtattaattctgggggatatgttttacctgtatttaaagtgataatatgagtcatatcatcaaataatgttgataatctgtttgcttgtttaattaatatgtcgtatgactctttaatctcatgatcctttgtgattataccatcacgtagtccttcagaatatgaaataatgcttgctaaaggtgtttttaaatcatgggctaagttttgaatcagttctgttttttcttgttgttcggatttaatttgattcatttgttgcgtaatttcagaagccattttattaaaagattgatttaattcataaatttcttttggtgaattaaacgttttatcattgcttgcgtaatttccgttagcaaattgcttagtttttatattaaactgcttaattttttgtataagtggattaataaaaatactacatattaataaggttaaacagcttgtaattattgtcgttaaggtcaaagttagtgtcatatggccgttaaaccacattaaaatatatgcaattgctaaaatagttgaagttaatagtatactcgatacgacgccaataatgatttgacttctaattgataacaccattatcggctcctttcaaatttatatcctaatccccatacagttgtgatggtatatgttgtaaagctctctttttctaatttttctctaatacggtgtatatggacattcacggtattagcatcttcgtaatagtcatatccccaaactttttcaagtaattctgatttagaaataacttcattttctctagaagctaaataccacaataactcaaattccttaatacgcatagggacttcatgaccatttacagtcacaactttacttaagttaataagtgttaattcatcaaatgacagttgttcaactggttgatgatggtatttcttcattcttgtaagtaaattattaatacgtaaaacgagttcccttggactaaatggttttttgacatagtcatctgcacctaaagttaaggcgtaaatggtatcatgttcttgtgttttggcagttaaatagataaaggggatatctaatttttgccttttcatttctttgacaatgtcgtaaccattaacttctggcatcatgatatcaagtaccatgatatcaatatcatttgatagtaaagaaattgcttctttaccgctagttgtcgttgttactttgtaaccttcatattcaaaataggtttgacaaatgtctacaatgtcttgttcatcatccacgatcagtaagtgggtcatctattttttcacctctgttcttacgacctctaaagtaattaatgatttctttaagtgaaatctgttttaacaatgagtgactcattaataaaaggataaagaaagttaattgaagaggatacgtaaatatcatatctgctaagatataatttatcataacaaaggctccaaagaaactagcagcatatgcaaaaactccaaaaattaaacctaatccaattgcaatctctccgagtgggacaacaatatcaaataatgacgtcgtatgtgcaactatatttgcgaaaaaccacttataccactctggtgaatcagtattgttagcgatgactggtactaaacctttcagcgtaaatccgcccgttaatttttcgtaaccttgcattaacataacaatacctgaacccacacgaatgataaatgtaacgagtagcaataatttattcatgatgttcacattctttctatttattgtgtgtaatttatataaacataagatttagcaacataatgtgatttgtagtgttatgtgaacaggaagtgtttgagctcatgggttgcttaagctaaacaaacctcaagctctaaaaaaatttacttatgtgctctacaatcttatgggatttaatagttgtatatatattgaaaaaaggaaagtatgatttctacaagctaggggggctgtgaaatcatacgctttccattgagtaatgagtgtaatgtatatttttaaaatttgtaatgtatagtaatagtatgttgtaaataaaagtttaactcagaaattgattattttaatttagcgccgccgaagatgacgtgagcttttttacaatagattgttacttcatcatatttgcttaaatctacatttttaagatcaaatgtttgtttttctttatcgtagtcaaccattgcgatttctttaccgtttttaatgtcgccattttttgttaggtagacgtataaatctggaccttttgatgatttgtagttagtaagcattaatttaccatttttaatctcagctttaccttcaacagtttcaccgtttttagaactgaatgtacctgttaggtgttttgttttatcagttttaacattgctatcttctgactttgttttttgttcagttttgttaccttgatcttgtgaattagaattaccacaagcgcctaaagctaatgttgtgataatagcaccagctgctaaaaaatattttgtattcatgctaactcctcatttcttcaatttgataagttaagtttaaaatgaaggcaaataatatgccattaactaattcttaacttcgtttaaatatcgcttaactaatattgaagaaagaataatttgaaaatgaaaataattgtctgatttaaataaataggagtcaaaataagaggagggcggttttttaagtgagaaaatatttatctaaactagttatcactataaaacacttctgatatagcgaactaagaatatcagaagtgttttttagttttggtattaaaatttataaaccttttgccacaataaaaacaacaagaaaataagatagacgattaaatacaagtaccaatatggtgttaaaaccatcataacgataaatgaaatgttaataatgataagtcctttaatcattagtttctttattttattattattttcagcagattcatctaagctattaaatgttgaaataaataacataataccaccaatgatgaaaatggcaggggctaaaaatggaatagacatatatattgattgtgtacttgaaaagtcggtaacacgttgcgttaaactgacaacaatcgttaatatgatagcaataaatttttggtctgtaatgtatacaggttttaattttttatcaatgtaaaactgtagtatcgtccaaatgataaacatcgttatagtacacagagtaataaagttatatttatcaattatgaatgtatttataaaggcgtttatagtaatagataacaacattgcacttaatgataaatgttgcatttgatgcctatataaattgaatccagttataagtacgacgatagcaatattaattaatatatatacaatcatgatggactcctgttcgttatacttcaatcaactattatatcaattaatatattgttattcattagatatgacttgtaaaaagtaaaataagttatcctttatacaccttttttattactccaaagtaatgtatgaagttgtggtaacacataaacgtgattcatatcattactttgcataactaaatctaccaactgctcgtagcgttctaacaacttttcggtatgattatctacgctgtctgataaatatgggttaccaacttgtaaatagaagggaatatctggataacggtggtgtatcattttggcaaaatcataatctttatcgtcgaatacaactacttttaagtttaatgaggaaggtacgcattgtgcaatcacttcatctaacttttttaaatcaggcgtcatagttgaacttggtggttttggactaatcgttaaatcatcaatttgtgtcatccaaggttggaatttactgccttgtgtctccagtgcgctgaaaatacctttatcttgaaataagtcaactaactcttggatacctttaattaatgctgggttaccaccagaaattgtaacgtggttaaataaatcgccaccaattcgttttaattcatcataaatttcttcagcggtcatgagttttatatcgcctttagcactaccatcccaagtaaatgcagaatcacaccagctacagcgataatcacatccagctgttctcacaaacatcgtttttctaccgattactcgaccttcaccctgaatggttggaccgaatatttcgagtacaggaattttagccattagttacacctgttcctttggtctaaatacgacataacttgttggtgtttctcttacaaatacttgaatacattttggttggtgttcgagcgatgccaaattttctttaacaatttgataaattgtttccgctacgatttcagttgaagggattttgtttttaaaagcaggtaagttatttaacagttgatggtcaaatttaccgtgtatcatctttttcaaatggctaaagttcactaaaaagccagtgtcatctagtttatcaccgacaattgttaaattaacaaagtaagtatgaccatggacattttgacaaatacctgcttcttcacacggaatgtgatgtgcagctgaaaaattaaaatctttatttaattcgaattgatatggatgcgttgtactaggatagatttgttgtaacattttaaagcgctcctttactttcaagatattgatttagtccacgttgacgtaaatgacaagctggacattcaccacagccatccccaatgataccgttatagcatgttaatgtttttgtacgaatataatctaaaacttcgagttcatcacttaatttccacgtttctgctttgtttaaccacattaaaggagtatgaataacaaaatctttgtccatagctaggcttaatgttacgttcattgattttataaaactatcgcgacagtctgggtagcctgaaaagtctgtttcacatacgcctgtaataatatgcttagccccaatttgataagctagagcacctgcaaacgacaagaaaagtaaatttctagctggaacaaatgtattaggtataccatcttcattattagtaatttccatatcatgttgtgttaatgcgtttggagtaagttgtgataataatgacatatctaaaacgtgatgtttcattccttgatcttgtgcaatttgttttgcgacttcaatttcagtatcatgtctttgaccataattaaacgttacgagttcaacttctttgaaatgtttttttgcataaaagagacatgttgtactgtcttgaccaccactaaagacaacgatggctttttcattatttaatacactttccattttgtaattgctcctatcattaataatattaataaagaggttaatggcattgataagcccgtttttaatttataaaataaaaaaagcctatctccataaaagatagacgaaagaaatgggttgctctataatatatattaaaggtttaccaacgaatgtttgaaatttcaatgtctagttttttatagagggtttcagctaggaacctctgatattcatttatgtacgatgaatagaatataccatatagtagttaaaatcaaggtcaggataatgacaatgcctttaaagttttagctacatccaatacatattataaaaataaaacacatttagaacggagtatacaatgattctagtcatagataataatgattcatttacatataatttaatagactatattaagactcaaacgaaactaacagttcaagttgttggtattgataatctgctgatagaagacatcattaatatgaagccaaaagcaattgttatttcacctgggccgggtaatccggatgattatcctatcttgaatgaagtgttagaacaattttatcagcgtgtacctatactaggtgtatgtttaggatttcaatgtatcgtgtcttattttggtggaaatatcattcacggctatcatcctgtacacggacatactacacagttacgccataccaatgaaggtatttttcaaggactgcctcaaaatttcaatgtaatgcgttatcattcattaattgctgacggagcgacttttccaaattgcttaaagattacagcaaaaaacgatgaagtaattattatggcatttgagcatattacatttccggtttttggtgtgcaatatcatcctgaatctattttgagtgaatacggttatcgacaagttgaattatttttatcgaaggtaggtgattactgtgagaatagaatataattatcgctactatttaactgaaaatgaatataagcaataccatattcaattaaagggatttataaagaagtatgttgccactaagttggctgatgtgggagaagtgatacactttgcacaagcgcagcaacgacaaggtagatatgtttcgttatatttaagttacgaagcggcaaagtattttaatcatgttatgtgtacacattcattagctaaagatgatatttatgcagtagcttatagttttgaaaatgcggaaagcataaattcaacatatgaacatcaaactacttatgtatcaaagcatcatttttcatttgttgaatcttctgaggttatgatgactaatattaaacgtgtccaacaagcaattgttgaaggcgaaacgtatcaagtgaactatacggcgcgcttaacggacaacatttattatcctattagtactttatatgaacgattaactcaatttagtaatggtaattatactgcgttattacaaacagatgaaatccaagtagcgtctatctcaccagaattattttttcaaaaaggacagtttaacaatgtcgataacgttatcataagcaaaccgatgaaagggacaatgcctagaggtaaaacggaagctgaagatcaacagtattataaaacattgcaaacttcttcgaaagatcgtgcagaaaatgtcatgattgttgatttactaagaaacgatatagggagaatatcacagagtggctcaattaaggtgtataaactatttttcattgaggtatataaaactgtatttcaaatgacttcgatggtaagtggaactttaaaaactaatacagacttaactcaaattttaacatcgttatttccttgtggttcgattacaggtgcaccgaaactgaatacaatgaaatatattaaacaattagaaagttcacctcgtggtatatactgcggagcaattggactattacttccaactgaagatgataaaatgatttttaatattccaattcgtactattgagtataaatatggacaagcgatttatggagtcggagcaggtattacaattgattctaagccaaaagatgaagtaaatgaattttacgcaaaaaccaagattttggagatgttataatgcaattatttgaaacaatgaaaattgataatggacatatccctagaattacttatcatactaatcgcataaaatgttcttctgagcgattaaactttaaatttgatgaacatgcatggcgaaatgaattaaacgatgtaacaacaaagtatcacaatggccaatatagacttaaaatcgtattacatgctgaaagcgaattcgaaacgatagtgtcacctttacctgagaaaagtagttttacagcaaaatttcaagtgttgcccaaagcagttaatccaacttttataaataataaaacgacagaacgaaagcatttagcacacaatcatgaaacagatttaatattgctaacttcagaggacggcaaggtccttgaatttgatattggcaacattgtcattgaagaggatggaaaatggtacacaccaagttataaagatgatttcttaaaaggatgcatgcgtgattatttaatagatagtgacaaacttgttgaaaaagactttaataaaaacgaattgatttataaatatcataacaatgagatacgtatatttttgataaatagtttacgagaggttgccgatgtccacctttgcctttaaaattagtatgataataatgtagaaaatgaagttaaaacaaatttaaaaattaaatggggccaaatatgattattgtttatattgtgctgttgttaattcttgtatacgtaaattatcgattagtgaatcgattgctatctgaaaatagaatatatgttgttcgtttgatagcaacaattactactgttataagctttatccttgtatacgcattaattcacgaactcatgccttttgttgtgcgagcaatggatttattgtatcaccagtaaatttaatgagtaggtaaaatgaactattcaatcgattctataattaaaaatcaaagtaaagtaaccaaatattgaagaggtgtacaaatgaaaatatatagtcaaggtgaccaagccattgtagtagcaattgaaaaagaagtatctaaaagtttaaccgaagatttattaacacttcgctcatatttaattgaacaaaattatccatttattatagaaattgtgccatcagaatcagacatgatgattgtctacgacgcaagggatatgattaaacaccataatatacaatcaccttttttatacatgaaagcactaatagaatcgattcatttaaacataaaacatgattttaaccagcaagatttgattgaaataccaattgtgtatggttcgaaatatggtccggatttagaatcacttttaaaacattacaaaatcaagctagaaacatttattgaattacattctaaggcgcaatattttgtttcgatgatgggatattcacctgggtttccttatttaactggattaaataagaaattgtatattaatcacacgagtaaacagaaaaaattcattccagctggttctgtagtacttgaagggaaaaaatgcggtattgtaactacggatacaattaatgattggttagttattggttatacaccattatcactttttaatccgaaagaatcagatttcgcacgcttaaagttaggcgataatattaaatttagacctatcaatgaaaatgaattagaagtaggagcgtttaaagatgtcaatcataattgaaaaaagtggcttattcagtagctttcaggactttggtagaaggggatatgaacatgatggtgtaattccatgtggtgcacttgatactttagcacatgaaattgctaatcgattagttgcaaatgacaagaatgaagcaactttggaaatgactaataaaatggcaacgattcgttttacagaacctacgctgattgcattagcagggggtaatgtcaaagcttacactgagcaaatgactatatctccatataaattgtatttgttagataaaggcgatgttttaaagtttagagaaacaagttatacatcgcgagtgtatttagctgtgggaggtggatttgaattagatgcatggttaggatctaattcaaccgactttaatgtaaaaattggtggttttaaaggaagaacattacaagatggcgatgaaataaagcttaagagagattatacagctcgtcatcataagttatttgaaaaccttgctcacacgaaacaaacagattggggtattgatgggtacgccttgtcatttaattatatgtctgatgtatttcatgtcgttaaaaataaaggtacggaagattttaaagaagatgccattcaaagatttgtgaaacatgattataaagtaacgagcaaagcaaatcgcatggggatgatgcttgaaggtgaaaaaatcaaagctttttatgaagatatgccaccgtatcagactgtcaaaaaaggaacgatacaaattaagcgtgatggcacacctattatcttattaaatgatcattacacgttaggtagctacccgcaaatcggtacaatcgcaagttatcatttaacgaaattagcacaaaaaccgcaaggatcacgtttgaaatttcaatttatagatattttaacggctgaaaagaacctcgttaagtatagtaactggttaaaccaattattccatggaatagaatatagaatgcaattagaaatgatgaaataatatttggtacgtagctcatactagagtccgatgcaaataatttcctcctaatgtataatgaaataatactgtgttttatctgcgaaatgtattatattctaattcgtttcacagtaaaatgaaaagataaagtgtgtttttacttgaattttgactaaaattactctatatttattaattgagctatgcttattattacaatttgattacaaattttaaatttgttaattgaatgataatattaaataaagaaacttacacaagcaaatatgagttgtagcccaaaatacttgttaaatcaaagttgaaagctacaaataatgaaaattataaacttgaatctgaaagtaattactataattatgacaatgttaacttttaaacgcacttattaattaactacataatgttaatatctaatttattcaagtactttcgcaagatttattatctaaataacgggggaaagaatcatgagttcacaaaaaaagaaaattagtctttttgcgttcttcttattaaccgtaataacgattaccttgaagacgtatttttcttattatgttgatttttctttaggtgttaaaggtttagtacaaaacttaatattattgatgaatccttatagtttagtagcactggttttaagtgtgttcctattctttaaaggcaaaaaagcattttggtttatgttcataggcggcttcttattgacgttcctattatatgccaatgttgtgtactttagattcttctcggattttttaacgtttagtactttaaaccaagtaggtaacgtagaatctatgggtggtgcggttagtgcatcattcaaatggtatgactttgtttatttcattgatacgttagtttacttattcattttaatatttaaaacaaaatggttagacacaaaagcatttagtaagaaatttgttcctgtcgtaatggcggcttcagtagcattattcttcttaaacttagcttttgctgaaactgacagaccagaattattaacacgtacatttgaccataaatatttagtgaaatatttaggaccgtataactttacagtatacgatggtgttaaaactatcgaaaataatcaacaaaaagcgttagcatctgaagatgacttaacaaaagtattaaattatacgaaacaacgtcaaacagagcctaacccagaatattatggggtagcaaagaagaaaaatattattaagattcacttagaaagtttccaaaccttcttaattaataaaaaggttaatggtaaagaagtaacaccgtttttaaacaaattatcaagtgggaaagagcaattcacatacttccctaactttttccatcaaacaggtcaaggtaaaacatctgactctgaatttacaatggataacagtttatacggtttaccgcaaggttctgccttttcattaaaaggagataatacgtatcagtcattaccagcaattttagatcaaaagcaaggctacaaatctgatgtcatgcacggtgactataaaacattctggaacagagaccaagtatataaacactttggtatcgataaattctatgatgcaacatactatgacatgtcagataaaaacgttgtaaacttaggcttgaaagacaaaattttctttaaagattctgctaattatcaagctaagatgaaatcaccattctattctcatttaattacattgactaaccactatccattcacattagatgaaaaggatgcaactattgagaagtcaaacacaggtgatgcaacagttgatggttatattcaaacagcacgttatttagacgaagcattagaagaatatattaatgacttgaagaaaaaaggattatatgacaattcagtgattatgatttatggtgaccactatggtatctctgaaaaccataacaatgccatggaaaaactattaggtgaaaaaatcacaccagctaaatttacagatttaaacagaactggtttctggattaaaatccctggtaaatctggtggtatcaataatgaatatgctggtcaagtcgatgtaatgccaacaattttacatttggctggtatagatacgaagaactatttaatgttcggtactgatttattctctaaaggtcataatcaagtagttccattcagaaatggtgactttataacaaaagattataaatatgttaatggtaagatttattctaataaaaataatgaactcataactactcaaccagctgatttcgaaaagaataaaaagcaagttgaaaaggatctcgaaatgagtgacaacgtgcttaatggtgatttatttagattctacaaaaatccagacttcaaaaaggtaaatccttcgaagtataaatatgaaacaggacctaaagcaaactctaaaaaataatatttaaacatgaacccggattgataaaatatcaatccgggtttttatttatgttcttttatattatgttttacattatatgtgttgataaaaaggtatattataaaaatcattagcatagtcatcaaagccttatcaagttttatttagagttgaagcaacaatatattaaattatgacacttaacagtatcgatttcttttgatttcaaaaaggtgtataatgtatagaactgatttaagtacgtagagatttcaacagaagaaggaagatgggtatggaagcatataaaattgaacatttaaataaatcttatgccgataagattatattcgataatctagatttatcaatttcagaaggtgaaaaaataggtttagtaggcataaatggtacagggaaaagtacgttgttaaaagtaattggtggtattgatgatgattttacagccaatgttatgcatccaaatcaatatcgaattcgttattcgtctcagaaacaggatcttaatgaagatatgactgtttttgatgcagtattaagttctgatacaacaactttacgcatcatcaagcaatatgaacaggcagtacaagcttatgcggatgatcaaagtgataaattgttcaagcgaatgatggatgcgcaagatgctatggatcaacatgatgcttgggactataacgctgaaattaaaacgatcctctcaaaactaggtatacatgatactactaaatacattaaagaattatccggcggacaacaaaaacgtgttgtacttgctaaaacattaatagaacaaccagatttattgttattagatgaacctacgaaccatttagacttcgaatcaatcagctggttgatcaattatgtgaagcaatatcctcatacagttttattcgtaacccatgatcgatattttttaaatgaagtttccactagaattattgaactaaacagaggtaagttagcgtcatatcctggtaactatgaatcttatattgaaatgcgcgctgaaagagaactaacacttcaaaagcaacaacaaaagcaacgagctttatataaggaagaacttgcttggatgagggctggagctaaggcacgtactacaaagcaacaagctagaattaatcgatttaatgacctagaaaatgaagttaaccagcaatataaagacgataaaggtgaattgaatcttgcttattcaagattaggtaagcaagtgttcgaattagaagacttatcaaaggctattaatgataaagtattatttgaacatctgacggaaattattcaaaaaggtgagcgtattggtgttgttgggccaaatggagctggtaaaacaacactcttaaatattttgagtggagaagaccaacaattcgaaggtaaattgaagactgggcagacggttaaagtagcttattttaagcaaacagatgagaccctggatagagatattcgtatgattgattatttaagagaagaaagtgagattgcaaaagaaaaagatggaacctcggtatctattacacaacttcttgaacgatttttatttccaagtgcaactcatggtaaaaaagtttataaattatctggtggagagcaaaagcgtttgtatttattacgtctactcgtacaccagccaaatgttctgttgttagatgaaccgacaaatgatttagatactgagactttaacaatacttgaagattatattcatactttcggtggtacagtgattaccgtaagccatgatcgctacttcttaaataaagttgcacagtcatattggtttattcatgatggtcagatggaaaagattatcggaacttttgaagattatgaaagttataaaaaatcattagataaaaataaatccacattgaagcaacactctaaatcttctacaactgtacgtaagaaaaatggtttatcatataaagaaaaattagaatatgaacaattgatgaaacgcatagaacaagcggaagtaagaatggaagaaattgatgtgctcatgattgaggcaagtgcagattatggggaaattaaagaattaaacgaagaaaaagaacaacttgaaattcaatatgatttagacatcacaagatggagtgagttagaagaaattaaagaacaacaataaggggtcaatttatgatgcaacaaacattatcgcattactttgggtatgaaacgtttcgaccaggacaagaagaaattattagcaaagtattagaccatcgtaatgtgcttggtgtcttaccaactggtggaggtaagtctatatgctatcaagtaccaggtttattgttaggtggtacaacaattgtaataagtccactaatatcattaatgaaagatcaagtggatcaattaaaagcgatgggaattcaagctgcttttttaaatagtagtttgactcaaaaagagcaacaacgtattgaaaaagcattatcaaatggagaaattcaatttttgtatgttgcaccagaacgatttgaaaaccgatattttttaaatatgcttcagcgtataaagattcatttagtcgcgtttgatgaagcgcattgtatatctaaatggggacatgattttagaccgagttatcaaaacgttatttctaaagtatttacgttacctcaagattttacaataatagcgttgacagcaactgccacggttgaagtacagcaagatattagagaaaagttaaatatcgctcaaactgatcaaattaaaacgagtactaagcgtagaaacttaatttttaaagtaaatcctacttatcaacgtcaaaaatttatattggattatattaaaacacacgatgaagatgcaggcattatttattgttctacacgtaagcaagttgaagagcttcaagaagccttagaaagccagaaaattgaaagtgttatatatcatgcaggtttgagcaataaagaaagagaagaagcgcagaatgatttcttatttgatcgtgttaaagtagtcgttgctacaaatgcttttggcatgggtattgataaatccaatgtacgttttgttattcattataatatgcctggagatttagaatcttattatcaagaagcgggtcgtgcaggtcgtgatgggttgaaaagtgaatgtattttgttatttagtgaacgcgatatcaatttacacgagtattttataacagtctctcaagctgatgatgactataaagataaaatgggcgaaaagttaactaaaatgattcaatatacaaaaacaaaaaaatgtttagaagcaacaattgtccattattttgaaccgaatgaaaaattagaagaatgtgaacaatgtagtaattgtgttcaacaagataaatcatataatatgacacaagaagctaagatgattattagttgcatcgctcgtatgaaacaacaagagagttatagtgttatcattcaagtgctaagaggagagtcaacagattatattaagtataaaggttatgatcaaatttcaacccatggtttaatgaaaggctacacaacatcagaattaagtcacttaatagatgaattaagattcaaagggttcttaaatgaaaatgatgaaatattaatgtgtgatacttcaattaaaaaattactcagtaatgaagtagaagtattcacaacaccatttaagcaaaaagcgactgaaaaagtatttataaatacggttgaaggggttgaccgagtattattcagtcaattggtagaagttcgtaaaaagttaagtgacaaattaacgatagcacctgtaagtatattttctgattacacgttggaggaatttgctaaacgtaagcctgcttcgaaacaagatatgattaatattgatggcgtaggtagttataaattaaaacattattgtccagcatttttagaaacgattcaaaattataaagccaaagtataatgaaggcacctagtaaacattccttgttttactgggtgttttttgaatttaaagtaaaataacactatttcttaacttgagattacctattattcattattttgttaaaaaagttcaaggataaatcatttaaatttgaaaattgtaataaacgtggttaaatagggaatacatacatataatctcggttttatgctatgagaaaaaaagaggtggcaaagtgattaagtttaaaaatgtaactaagcgttatgacaaacatgttgctgtcgataacattagtttcgatattaatgagggtgaattctttgtactaattggaccttcaggttgtggaaaaactacgacattaaaaatgattaatcgactcattcacttaagtgaaggttatatttattttaaagataaaccaataagtgattatccagtatacgaaatgcgttgggatattggatacgtattgcagcagattgcattattcccacatatgacaatcaaagaaaatattgcacaagtgccacaaatgaaaaagtggaaagaaaaagatatagataaaagagtagatgaattacttgaaatggttggattagaacctgaaaaatataaaaacagaaaacctgatgaattgtcagggggacaacgacaacgtgtaggagttatacgtgcgttagcagctgatccaccagttattttaatggatgaaccgtttagtgcattagacccaatcagccgagaaaaactccaagatgatttaattgaattacaaactaaaattaagaagacaatcatatttgttacacatgatattcaagaggcgatgaaacttggtgataagatttgtcttttgaatgaaggtcatattgaacaaattgacacaccagaaggatttaaaaataatcctcaaagtgaatttgttaaacaatttatgggtagtcatttagaagatgatgtgccatgtgttgaagagaatgcgattatccgtgacttggatattatgaaaccaatcgatgaggttacatctatgagcgcttatccaattgtttatgacaatcaacaaattgaagtattgtatcaacatttatcagagagcgagcgtgtcattgtcatgcaagaagatggcgtaggtcaatatgttattgataggaaagatatcttcaaatatttgtcccagaaaaaggaggtagctcaacatgactaactttttcgacatattgagtgagcgtaaggggcaactattttcgacaatgatagaacatattcaaatatcatttatcgcattattgattgcaactgctattgcggtaccattaggtattttattgacgaagactaaaacgatatctgaaatcgtaatgaatattgcggcaattcttcaaaccataccatcgttggcattattaggtttaatgattcctttatttggtatcggtcgtgtgccagcaattatcgcacttgtagtgtatgcattgttaccaattttaaggaatacgtatactggaattaaagaagttgatccatcgctcattgaagcggctaaaggtataggtatgaagccatttagacgtttaactaaagttgaacttccaatagcaatgcctgttataatggctggtgtaagaacggctatggtattaattataggtacagcaacactagcagcattaattggtgcaggcggactaggagatttaattttattaggtatagaccgtaacaatgcatcattgatattattaggtgcaattccagcagccttattggcaattatatttgatttaattttaagatttatggctaaattatcttataaaaagttattgatgacgttaggtgttatagtgatgattattatactggccatcgctattcctatgtttgcacaaaaaggtgataaaattacgttagctggaaagcttggctccgagccttcgattattacaaatatgtataaaattttaatagaagaagagaccaaaaatactgtagaagtgaaagatggtatgggcaaaacagcatttttatttaatgctttaaaatctgacgatatagatgggtatttagagtttactggaacagttttaggtgaattaacaaaagaaccattgaagtcaaaagaagagaaaaaagtatatgatcaagctaagcaaagtcttgaaaagaaatatcaaatgactatgttaaaaccaatgaaatataacaatacgtatgctttagctgtaaaacgtgattttgctaaacaacataatatacgtacaattggtgatttaaataagattaaagatcaacttaaaccaggatttacattggaatttaatgatcgtccagatgggtacaaagctgttcaaaaggcttataatttaaatttagataacatacgtacaatggaacctaagttgagatatcaagcgattaataaaggtaatattaatttaattgatgcatattcaactgacgctgaattaaaacaatatgatatggttgtgttaaaagatgataagcacgtatttccaccatatcaaggagcaccattatttaaagaaagctttttaaagaaacatccagaaattaagaaaccgttaaacaaactagaaaacaaaatatctgatgaagatatgcaaatgatgaactataaagtaacagttaaaaatgaagacccatatacagttgcgaaagattatttaaaagcaaaagggttaatcaaataacgaccaacgccacataagatgaggggcacgccattatatcttatgtggcgttgctatatttacatctatgtttatgttcaatttaaacatgcaatactgattaaaaaatatgacatgttaaacacaatgtaagctagtaatgtgtgaaaatagtagcattgcattttagaaacatagagcgatataatgaatataagttttttaaaatttcagttaattctaaggaggttgtttttattatgaaagaacaacttaatcaactatcagcatatcagcctggtttatcaccaagggcattgaaagaaaagtatggcattgaaggagatttatataaacttgcatcaaatgaaaatttgtatggaccatcgcctaaagttaaagaagcgatatcagcacacttagatgagttatattattatcctgaaacaggatcaccgacattaaaagcggcgattagtaaacatttaaatgtagatcaatcacgcattttatttggtgcgggattagatgaagttatattaatgatttctagagcagtattaacgccaggggacactattgttacaagtgaagcgacattcggtcaatattatcacaatgcgattgttgaatcagctaatgtgatacaggtacctttaaaagatggtggcttcgacttagatggcattttaaaagaagttaatgatgacacgtcattggtatggttatgtaatccaaataatcctacaggtacgtattttaatcatgagagcttagattcgtttttatctcaagtaccatcacatgttccggtactcatagatgaagcttattttgaatttgtgacagcagaggactacccggatacacttgctttgcaacaaaaatatgacaatgcattcttattacgtacattttcaaaggcgtatggattagcgggtttacgtgtaggatatgtggtagcaagcgaacatgcgattgaaaaatggaacatcattagaccaccatttaatgtgacacgtatatctgaatacgcagcagttgcagcacttgaagatcaacaatatttaaaagaggtaacacataaaaatagtgttgaacgtgaaagattttatcaattacctcaaagtgagcatttcttaccaagtcaaacgaattttatatttgtaaaaacaaagcgggtaaatgaactttatgaagcacttttaaatgtagggtgtattacgcgaccatttccaactggtgttagaattacaattggttttaaagaacaaaatggtaaaatgttagaagttttatcaaactttaaatacgaatagtaagtgggcaccacatggtatgaatatgtgacaaaatgcagtgtgaatgatgaggtgagagtattcagtgtaaaaagcaacaatagatgatattgttttgtatcaattgcttttttgctatactgaatcaatactgatattttgaggagaagattaaaatgacccgtaaatcaatcgcgattgatatggatgaagtattggcagatacattaggagaaatcattgatgctgtcaattttagagcggatttaggtattaaaatggaagctttgaatggtcaaaaacttaaacatgttattcctgaacatgatggattaattacagaagtattaagagaaccaggcttcttcagacaccttaaagtgatgccgcatgcacaagaagttgtaaaaaaattaactgaacattatgatgtatatattgctacagcagcaatggatgtaccaacatcattcagtgataaatatgaatggttactagagttctttccattcttagatccacagcattttgttttttgtggtagaaaaaacatcgttaaagctgattatttaatagatgacaatcctagacagcttgaaatttttactggtacaccgattatgtttacagcagtgcataatattaatgatgatcgatttgaacgcgtaaatagctggaaagatgtagaacagtattttttagataatattgagaaataaaaatatgtcactcgaagcctttcatgtagcaaataaaatgcatatactggggccccaacaaagagaatttcgaaaagaaattctacaaacaatgcaagttggggcggggccccaacataaagaaatactttttctttagaaattagtatttcttatgcatgagtgtaactcatgcaatcctatttttaagtacacattagctgtgactaatgataaagaatcgctacataatcaaccattagtcgttctttatcatttccatcccactctcaataaatgttagtctatctcattattataaatcggatgaatgtgttaatctatggcagattacacttcatccgattttttatagaatttgaaaaaggcacataaaccactatgatttaaaatacaacatcaatcattttagtggcatgcgccaaaattatatgtctgtttttgaaacagggtaatagcttaaagctaataccaacaaatattacgtacgttgaatcttatgattacactttaaacctaatataatatcgcgttaatatcattccggatgcttacaaatcattgacagtaagcaactgaatggcatttggtataacctcaatatcaataggtgtttctaatgaaatttcgccatcaatatcaactttcattgttggatctgttgtaagtgaaatctttttaccaggtatatgctcaataccttgagtaatttcattccaattcatactatcacgctttttaaaaatatcatttaaaatactgaaactttgttcattaaaaatgaaagtgttcagttcaccatcttgaggagacaaatcagtcaatggtattcgactaccaccaatgaatggaccatttgctgatagtatcatggtcgtttcgccagaatatgtcttatcatcaattgataattgataattaaattgtgttggatttagcagtgttttgacagttgatccaatataactcaatttaccaaatatatcttttgaaccatcttgtacgttttcagcgttttgaacaattagacctaagccaacaaagttgagtgcatattgattatttattttaattacatcgtatgtaccaacttgtgcagaaatcatttgttcactagcttgtttatgattaggtgctatatttagcgtttttgtaaaatcattaaaagtaccgcctggtaaaatgccaatagggagttgaaggtcgtgtgtcataacaccatttataagttcgttaaccgtgccatcaccgccaagaataaataatatatctacatcttttgcataatctttagctttaatttcttggcaatatttaattatgtcaccttcgttttcactcaattgaatagaaagatgcttacaaattgaacttaatgccgttgtaacttccccgataccttgattaatattttttaatccactgtgttcatggtaaaagaggacaccatgtgtatatttattttccatagtttagcctactttctaaaaattggttcattaaatatatatacccacttttaattgttaataccaaaaatatgtttttaaatagagaaaatggtaataactgaaattgatgtctatagagtgggacgagaaaatatagttatagttgtctataacgagcatattaagtttttatttatactgatatcttgaatttaattattagaaaccaataaaaaaacagtaagccatttaaatgacttactgttttttgaattaggccaacaatattaacgaatacctttcattgctttaataattaaaggtgagaatgctaatacaattgttgtaacaataattgcaacaacacctaagaagataaagtaatttgtttgacctagtggttctattaacttaactaatgtaccattgattgcttgtgcagaagcgttagttaagtaccaaatactcatcatttgggcattaaatgctttaggtgctaacttaacagcagcactattacccgttggtgataagcaaagttcaccgataacacagataatgtacgataaaataacccagttaactgagaagtttgatgaacctgatgcataacctacaataccaattagtatgtatgacgcacctgctaagaacgtaccaattgcaaatttcactggcaggctaggttgtttagttccaagcttttgccataaaagtgaaataattggagctaataataaaataaataatgggttaattgattggaaaatcgcttcaccaaagtttgttttccaaccaaataagtttaatttcatatctgaatgttcaattccataaatgttcaatacattagacccttgttcttgaatagcccagaacaccattccaagaataaataatggaataaatgctttaacacgagaacgttcagtatcagtgacatctttacttctaataattaaagtgaagtaaatgattggtaatgcaatacctaatactaaaacagtattactaactaagttaaatgataatgagttagttaatgcaccaataacgataattaatacaattgctaagataacacttccgataataagaccatactttttcttttcagctggtgtcaatgggttagtaggtttcataccaacgctacctaagtttttgcggttgaaaagtacataccatactaaacctaatgccataccaacagctgcaatcaagaatccaccgtggaagtttttaacattaacaaagtgttgcaaaataataggtgataataatgcacccatattaactgacatatagaaaataacaaaacctgcatccatacgtctatcattttcaggatataaacggccaacgatatttgaaatgtttggcttcattaaacctgaaccaataatgatgaagaacattgatgtgaataagccgattaatgcaaatggtaagcttaaacaaatatgtccgataataataaagactgcacctaataaagtagcgcctctagtacctgtaattctgtcagcaatccatccgcctggtattgatgtcatatagattaatgaaccataaactgacataattgacatagctgttgttttatcaattccaaggccattatctgttacggcaaagtacatgtagaaaatgagtagggcacgcatgccataataactaaacctttcccagaactctacaaagaagagtacgcctagccctcgaggatgcccgaaaaatcctgtttgaggtatgtcttgaatttgatttccatgggagttttgttgtgtcatttatacatcccatcctttcttcccctaatacaatagtttaagtaaatttgattgtgccttatcaactaaatatttcacaaatcacaaaaaaataaaaatattgagaatattctgttattaagcgcgcacaattaattagagataatataaaaatatacttattgacgttaaagtgcaataggtttctataaaaatgttgtttaattcgtgtactaatattcttttggtgtactttggtataaaatgttattttaatgtaacctattatgtatgctaaatgaaaaacacaccaataagttaggaaaatcaacttattggtgtgtttattaaatgatacatttaacgattatctattttttcgggatataaatcatgattcattaaacgatgttcagccatttgttcgtatttagaatttggtcgtccatagtttgtataagggtcaatagaaattccaccacgtggtgtgaacttgccccaaacttcaatataatgtggatccataagctctatcaagtcattcataattatattcatacaatcttcatggaaatcaccgtgatttctgaaactaaataagtaaagtttcaacgattttgattcaaccattttaacatttggaatataagaaatatagatagttgcaaaatctggttgcccagtaatcggacataatgatgtgaattctggacagttgaattttacgaaatagtcacgaccttgatgcttattatcaaacgattctaatacatcaggacgatagtcaaaattgtacgtattgtcttgatttcctaataaagttatatcttgtaattcatcttgttgacggccatgtgccataaaaagcgctcctttaaatttatttttttattactttggcgtctcggcgtgctttttcaaacatgtaataacttgcaccgataataacgacgtaacctaatgttgcatagaaatctggagattctccaaatagaataaatccaagtattgctgtgaaaattatagatgcatatgtgaaaatagaaatatctttcgcagcagcaaaactatatgccaatgtaacgccaatttgacctacagctgcagctaaaccagcacctaatagataaagcacttgcgtttgactcattggttcataggtatatgcagtgaaaggtattaaaacgatgacagaaaataaggagaagtaaaatactatagtatatggtgcttctctagtactaagtgcgcgtacacacgtatatgccgatgcagcaaaaatacctgaaaatagtccagctagtgatggaatcatagatgatgaaaattcaggtttcactattaaaagcatacctaaaatagcaattatcattgctgttatttgatatttccttaccttttcatgtaagaaaacaatacttaataaaatcgtccagaaaggattgagtttcattagtgaatcagcatcgctaagtaccatatggtcaatggcgtaaatatttaataatacacctatgagtccaagtgttgatcgtgttaataataatggttggcttgagagtttaccaaacattggttgatgatatttatatataaaaaataatggaataaacattgctactaagtttcgtgctaatgatttttgaaaaacaggaagatcacctgcaagtctgaaaaacactgacataaaactgaaaccaatagccgaaattaaaatggcaatgataccttttactttaggattcaattttatcgcctcttttatataaaattaacgtatttatattagcataaaacaacatgttgtgcataaatagttgaaatttactataaaaagactataatagactttatcgaacaagtgttctgtgtttatttgtcggaataatagggcattacacttttatgaatgtttgtgttattacataaaacaaatatcaattcagtatcaagctaataagctttttcttgatttctgttgatacaattgagattgacacagattttaaaaaatcaagtgatatctactgaaaaaatttttttaatttgttcaagtttttctaattaagtattggtgcctagttggaacgttttacgaacattcgattagaaaatgacactttaaatcatagtgtgtcttatgtataatgaaacacataatatagtgttggttaaacgaaaaagacacaatatcttgtgttttgtatgcaaatgctttatttatgaagaaattacatttaaaagtaatttaacacagaaatttaatagttattatcaatgaatagtcatattttttagaaaatgtactgagcaaatggaaggtatctaatgatctaaacactacatatagtgatttttatacattcaacccatataagctactattttctcaaatataaatctatgcaattggtttacatttgagaaaataagtagcttcattatagttaatacaatgctgagataaccatagtagcgacgttgttaaagcattttttaattgtaatgactacttaatttaaaagggttgaagaaagaaggtgatccaatgaaaataatatatttttcatttactggaaatgtccgtcgtttcattaagagaacagaacttgaaaatacgcttgagattacagcagaaaattgtatggaaccagttcatgaaccgtttattatcgttactggcactattggatttggagaagtaccagaacccgttcaatcttttttagaagttaatcatcaatacatcagaggtgtggcagctagcggtaatcgaaattggggactaaatttcgcaaaagcgggtcgcacgatatcagaagagtataatgtccctttattaatgaagtttgagttacatggaaaaaacaaagacgttattgaatttaagaacaaggtgggtaattttaatgaaaaccatggaagagaaaaagtacaatcatattgaattaaataatgaggtcactaaacgaagagaagatggattctttagtttagaaaaagaccaagaagctttagtagcttatttagaagaagtaaaagataaaacaatcttcttcgacactgaaatcgagcgtttacgttatttagtagacaacgatttttatttcaatgtgtttgatatttatagtgaagcggatctaattgaaatcactgattatgcaaaatcaatcccgtttaattttgcaagttatatgtcagctagtaagtttttcaaagattacgctttgaaaacaaatgataaaagtcaatatttagaagactataatcaacacgttgcaattgttgctttatacctagcaaatggtaataaagcacaagctaaacaatttatttctgctatggttgaacaaagatatcaaccagcgacaccaacatttttaaacgccggccgtgcgcgtcgtggtgagctagtgtcatgtttcttattagaagtggatgacagcttaaattcaattaactttattgattcaactgcaaaacaattaagtaaaattggtggcggcgtagcaattaacttatctaaattgcgtgcacgtggtgaagcgattaaaggaattaaaggcgtagcgaaaggtgttttacctattgctaagtcacttgaaggtggctttagctatgcagatcaactaggtcaacgccctggtgctggtgctgtgtacttaaatatcttccattatgatgtagaagaatttttagatactaaaaaagtaaatgcggatgaagatttacgtttatctacaatatcaactggtttaattgttccatctaaattcttcgatttagctaaagaaggtaaagacttttatatgtttgcacctcatacagttaaagaagaatacggtgttacattagacgatattgatttagaaaaatattatgatgatatggttgcaaatccaaatgttgagaaaaagaaaaagaatgcacgtgaaatgttgaatttaattgcgcaaacacaattacaatcaggctatccatatttaatgtttaaagataatgctaatagagttcatccgaattcaaatattggacaaattaagatgagtaacttatgtactgaaattttccaattacaagaaacttcaattattaacgactatggtattgaagacgaaattaaacgtgatatttcttgtaacttaggttcattaaacattgtaaatgtaatggaaagcggaaaattcagagattcagttcactctggtatggacgcattaactgttgtaagtgatgtagcaaatattcaaaatgctccaggagttagaaaagctaatagtgaattacattcagttggtcttggtgtgatgaatttacatggttacttagcaaaaaataaaattggttatgagtcagaagaagcaaaagattttgcaaatatcttctttatgatgatgaatttctactcaatcgaacgttcaatggaaatcgctaaagaacgtggtatcaaatatcaagactttgaaaagtctgattatgctaatggcaaatatttcgagttctatacaactcaagaatttgaacctcaattcgaaaaagtacgtgaattatttgacggtatggctattcctacttctgaggattggaagaaactacaacaagatgttgaacaatatggtttatatcatgcatatagattagctattgctccaacacaaagtatttcttatgttcaaaatgctacaagttctgtaatgccaatagtagatcaaattgaacgtcgtacttatggtaatgcggaaacattttaccctatgccattcttatcgcctcaaacaatgtggtactacaaatctgcattcaatactgatcagatgaaattaatcgatttaattgcgacaattcaaacgcatattgaccaaggtatctcaacgatactttatgttaattctgaaatttctacacgtgagttagcaagattatatgtatatgcgcactataaaggattaaaatcactttactatactagaaataaattattaagtgtagaagaatgtacaagttgttctatctaataagtaaacgtaaaaaatgacaaacaactaatcatctcgtttaaaataacagatgattagtctgccatgtctatatttgtcaattattgagagtaacattacaggaggaaattatattcatgatagctgttaattggaacacacaagaagatatgacgaatatgttttggagacaaaatatatctcaaatgtgggttgaaacagaatttaaagtatcaaaagacattgcaagttggaagactttgtcagaagctgaacaagacacatttaaaaaagcattagctggtttaacaggcttagatacacatcaagcagatgatggtatgcctttagtcatgctacatacgactgacttaagaaaaaaagcagtttattcatttatggcgatgatggagcaaatacacgcgaaaagttattcgcatattttcacaacgctattaccatctagtgaaacaaactatttattagatgaatgggttttagaagagccacatttaaaatataaatcagataaaattgttgctaattaccacaaactttggggtaaagaagcttccatatatgaccaatatatggccagagttacgagtgtatttttagaaacattcttattcttctctggtttctattatccgctatatttagctggtcaaggaaaaatgacgacatcaggcgaaatcattcgtaaaattcttttagatgaatctattcatggtgtgtttactggtttagatgcgcagcatttacgaaatgaactatctgaaagcgagaagcaaaaagctgaccaagaaatgtataaattgctaaatgacttgtatttaaatgaagagtcatacacaaaaatgttatacgatgatcttggaatcactgaagatgtgttaaactatgttaaatataatggaaataaagcactttcaaatttaggttttgaaccttattttgaggaacgtgaatttaacccaattattgagaatgccttagatacaacaactaaaaaccatgacttcttctctgtaaaaggtgatggttatgtattagcattaaatgtagaagcattacaagatgatgactttgtatttgacaacaaataataattaaaattaaaaagaccttcacatgaaagggtaatagcgattcgtttcgtcttgactcctacatgttgaaggtcttttttctataacttaaaaacgtatgcacattttgaaaaagtaaaaatggcatttaatgatgccaatgaggctagaaagtatacaagatactgcattacaaaagggtgtgctattttactatatacatctaaattacacatttacaaaaaatgatttctattttaattgcaaatatcaataaaattgacaataaattatttgaaaggctattgaaatgagtgacaaaaaacgataccattaatgagaaatgttatcaatgataataattatcattaaattaaagggagaaaattttgtaatgaagtatttattaaagggaaaaattttgcttctattacttatattgctaacaattatttcgttgtttataggtgtcagtgaactgtctattaaagatatctttcatttgtcagactcacagcaaaatatattgttctcaagccgaataccgagaacgatgagtattttaattgctggaagttcattagctttagctggcctaatcatgcaacaaatgatgcaaaataagtttattagtccaactacagctgggacgatggagtgggcaaaattaggaatcttaattgccctattattctttccaactggtcatattttattaaaactagtatttgctgttatttgcagcatcagcggaacatttttatttgttaaaattattgattttatcaaagtgaaagatgtcatctttgtaccactattagggattatgatgggtggcattgtcgctagttttacaacgtttatctcattacgtacaaacgcagttcaaagcattggtaactggcttaacgggaactttgccattatcacaagtggacgttatgaaatcttgtatttaagtattcctcttttagcattgacatatctttttgcaaatcatttcacaattgtaggtatgggtaaagactttaccaataatttaggtttgagttatgaaaaattaatcaatattgctctatttattactgccacaattacggcattagtcgttgtgacagttggaactttacccttcttaggtttagttattccaaatattatttcgatttatagaggcgatcatttaaaaaatgcaattcctcatacgatgatgttaggtgccatctttgtattgttttctgatatagttggcagaattgtagtttatccatatgaaattaatattggtttaacaataggtgtatttggaacaatcattttccttatcttacttatgaaaggtaggaaaaattatgcgcaacaataataaaaaaataatgcttttaattgcagtcacgttcttaattagtatgctgtacttatttgttggtattgattttgatatatttgaatatcaattttcaagtcgtttaagaaagttcatattaattattttagtaggtgctgccattgcaacatccgttgttattttccaagcgattacaaataatcgtttattgacaccatcaataatgggattagatgcagtttatttatttatcaaagtattgcccgtctttttatttggaattcaatcggtatgggttactaatgtatatttgaactttatattaacacttataacgatggtgttattcgcactaatcctattccaaggtatctttaaaattggacatttttcaatttactttatcttacttataggtgtccttttaggaacattttttagaagtattacaggttttattcaattgattatggatcctgagtcatttttagcaatacaaagtagtatgtttgctaattttaatgcttctaattcgaatttagttactttttcagcagtattattagtaatcatattagtcattacaatttttctattgccatatttagatgtattgcttttaggtcgtgctgaagcaattaatctggggatatcgtatgaaaaattaacgcggattctacttgtaatagtttctgtcttagtctctgtgtcaactgcattagtaggaccaattacatttttaggcttattgactgtaaatctagcgcatgaactaatgaagacgtatgaacataaatatatattaatcgcgacaatttgcttgagttggattagtttatttagtgcgcaatgggtagttgaaaatgtgtttgaggctacgacagaaatgagtatacttattgatttaattggtggaagttatttcatttatctattagttagaaggagaaatgcgcaatgattcaagttgggaatttaactaaaactataaataatcaaatgatattggacgatattagcatagaaattgaaaaaggtaagttgacttctttaattggacctaatggagcagggaagagtacgttactttcagcgatatgtcgcttaattcggtttgatgaaggggaagtaaaaatagatggacagcttatgtctgattataaaaacaatgatttgtcgaaaaagatatcgattttaaagcaaacgaaccatacagaaatgaacattactgtagaacaattagttaatttcggacgatttccatattctaaaggacgtttaacgaaagaagaccatgaaattgttaatgatgctttagatttgttgcaattacaagatattagaaagcgtaatataaaatcattgtctggtggacaacgtcaacgtgcctatatagcgatgaccattgcacaagatactgaatatattcttttagatgaaccgttaaataatttagatatgaagcatgctgttcaaattatgcaaacgttaaaaatgttagcgcataaaatgaataaagcgattgtcattgtgttacatgatattaactttgcgtcctgttattcagatcagattgtagcaatgaaaaacggacaactagttaaatcagatttgaaagataatgtcattcaaagtagtgttttaagtgatttatatgacatggatattcaaattgaacatataagaaatcaaaggatttgtttatattttaaggattgataatttggagacactttaaaggggtgatgcgccaattaaagaagggttaacaagtatttattcgtatttcacatcaagcacacagattaagccaaaagaggagaatattatattatgaagaaaacagtcttatatttagtagtagcagtaatgtttttattagcggcatgcggtaacaattctgataaagaacaatcaaaatcagaaactaaaggttctaaagatacagtaaaaattgaaaacaactataaaatgcgtggcgagaaaaaagatggtagcgatgctaaaaaagttaaagaaactgttgaagtaccaaagaaccctaaaaatgcagttgtattagattatggcgcattagatgtaatgaaagaaatgggcttatcagacaaagtaaaagcattacctaaaggtgaaggcggcaagtcattaccgaatttcttagagtcatttaaagatgacaagtatacaaatgttggtaacttgaaagaagttaatttcgataaaattgcagcaacaaaaccggaagtaatctttatctctggccgtacagcaaatcaaaagaatttagatgaatttaaaaaagctgcaccaaaagcaaaaattgtttacgttggtgcagatgaaaagaatttaattagttcaatgaaacaaaacactgaaaatattggtaaaatttacgataaagaagataaagctaaagaattaaataaagatttagataacaaaattgcttcaatgaaagataaaactaagaagttcaacaaatcagttatgtatttattagttaatgaaggtgaattatcaacatttggacctaaaggtcgtttcggtggattagtttacgatacattaggtttcaacgcggttgataaaaacgtaagcaatagtaaccacggacaaaatgtctctaacgaatacattaataaagaaaatccagatgttattttagcaatggatagaggacaggctgtaagtggtaaatcaactgcgaaacaagcattaaataatcctgtattaaaaaatgttaaagcaattaaagaagacaaagtttataatttagaccctaaattatggtactttgcagctggatcaactacaactacaattaaacaaattgatgaacttgaaaaagttgtaaaataattttaaaagaggggaacaatggttaaaggtcttaatcattgttcccctctttgctttaaaaaagggaatctgggacgtcaatcaatgtcctagactctaaaatgttctgttgtcagtcgttggttgaatgaacatatacttgtaacaagctcatttcaatacctgtgggctccaaacatagagaaattggatttccaatttctacagacaatgtaagttgccgggctccaaacatagagaatatcaaaaagaaattctacagaagtggtgctttatcatgtctatcccactccctataattttttggctatgttgtttaaatttcgaaataaatatgatagtgatatttgcagcgattgttaaatcgagattggcaattaggacaacgctcaaccatcatatattcattgattgttaattcatgtttgcatacaccgcataagattgctttttcgttaaatgaaggctcagaccaacgcttaatggcgtgcttttcaaactcattatggcacttatagcatggatagtatttattacaacatttaaatttaattgcaataatatcttcttcggtaaaataatggcgacagcgtgtttcagtatcgattaatgaaccataaactttaggcatagacaaagctccttaacttacgattcctttggatgttcaccaataatgcgaacttcacgatttaattcaatgccaaatttttctttgacggtcttttgtacataatgaataaggttttcataatctgtagcagttccattgtctacatttaccataaaaccagcgtgtttagttgagacttcaacgccgccaatacggtgaccttgcaaattagaatcttgtatcaatttacctgcaaaatgaccaggcggtctctggaatacactaccacatgaagggtactctaaaggttgtttagattctctacgttctgttaaatcatccattttagcttgtatttcagtcattttaccaggagctaaagtaaatgcagcttctaatacaactaagtgttctttttgaataatgctattacgataatctaattctaattcttttgttgtaagtttaactaacgagccttgttcgtttacgcaaagcgcatagtctatacaatctttaacttcgccaccataagcgccagcattcatatacacagcaccaccaattgaacctggaataccacatgcaaattcaaggccagtaagtgcgtaatcacgagcaacacgtgagacatcaataattgcagcgccgctaccggctataattgcatcatcagatacttcgatatgatctagtgataataaactaattacaatgccacgaataccaccttcacggataataatatttgagccattgcctaaatatgtaacaggaatctcattttgataggcatatttaacaactgcttgtacttctacatttttagtaggggtaatataaaagtcggcattaccacctgtcttagtataagtgtatcgttttaaaggttcatcaactttaattttttcatttgggataagttgttgtaaagcttgatagatgtctttatttatcacttctcagtacatcctttctcatgtctttaatatcatatagtattataccaattttaaaattcatttgcgaaaattgaaaagaaagtattagaattagtataaatataaaatacggcattattgtcgttataagtattttttacatagtttttcaaagtattgttgcttttgcatctcatattgtctaattgttaagctatgttgcaatatttgatgctttttagtattgaattgtaaagcgatctcatcattagtcgataagagacgatcaagtgcaagataagattcaaatgtttgggtattcatttgaatgatatgtagacgcacctgttgttttagttcatgaaaattgttaaacttcgccatcataacctttttattatatttatgatgcaaacgataaaaccctacataatttaagcgtttttcatctaaggatgtaatatcatgcaaattttctacacctactaaaatatctaaaattggctctgttgaatatttaaaatgattcgtaccgccaatatgttttgtatattttactgggctgtctaagaggttgaataataatgattcaatttcagtgtattgtgattgaaaacaattagttaaatcactattaatgaatggttgaacatttgaatacatgataaactcctttgatattgaaaattaatttaatcacgataaagtctggaatactataacataattcattttcataataaacatgtttttgtataatgaatctgttaaggagtgcaatcatgaaaaaaattgttattatcgctgttttagcgattttatttgtagtaataagtgcttgtggtaataaagaaaaagaggcacaacatcaatttactaagcaatttaaagatgttgagcaaaaacaaaaagaattacaacatgtcatggataatatacatttgaaagaaattgatcatctaagtaaaactgatacaactgataaaaatagtaaagaatttaaggcactacaagaagatgttaaaaaccatctcatacctaaatttgaagcatattataagtcagcaaaaaatttgcctgatgatacaatgaaagttaagaaattaaaaaaagaatatatgacgcttgcaaatgagaagaaggatgcgatatatcaattaaaaaaaattcataggtttatgtaatcaatctatcaagtataacgaagacattttagattatacgaaacaatttgaaaaaaatagatacaaagttgaatcagaaattaaattagctgataataaaagtgaagcaactaatcttacgacaaaattagaacataataataaagcgttaagagatactgcgaaaaagaacctagatgatagtaaagaaaatgaagtaaaaggcgcgattaaaaatcacattatgccaatgattgaaaaacaaattaccgatattaaccaaactaatattagtgataagcatgttaataatgcaaggaaaaacgcaatagaaatgtattacagtctgcagaactattataatacacgtattgaaacaataaaggttagtgagaagttatcaaaagtcgatgtagataagttgccgaaaaagggtatagatataactcacggcgataaagcctttgaaaaaaagcttgaaaaattagaagaaaaataactataatcatttttcaaagttaaaaattttgaatttatggttaacatgtcaacttactatgtgtataatggtaaacattgatattaactatatgtataaaaatgtcacgcagatgctatttaaatgtgataaatatttttagaggtgaatagagtggctataaagctaagttcaattgaccaatttgaacaggttattgaggaaaataaatatgtttttgtattaaaacatagtgaaacttgtccaatatcggcaaatgcgtacgatcaatttaataaatttttatatgaacgcgatatggacggttattatttgattgtccaacaagaacgcgatttgtcagattatattgctaaaaaaacgaacgttaaacatgaatcacctcaagcattttattttgtaaatggtgaaatggtttggaatcgagaccacggtgatattaatgtgtcgtcattagcacaagcagaagaataatgaaactatagggttggaacattttgccttacactactagacgtgaatagcacaacttaaattcgtgtgaatcagagtagtttggctataatgatgttctgaccttttattttatgtaacctttagaagcagttaagttagtacttttttacaaacatatgtataatgtattcgagtatttttattgaaaatattttggaaaacgacgaatccaataagaaaattttaacatgatttgtaagttagtttaataggaaatacatgctaaaccataagaagtatactgttatttgctggaataattaataatcatgtcatgttaaatgttcgcatataatcacgagataaaatctaaaatttaagattaatcttttatgaataaaaaacgtatcacaacaaataataaagtaaggtggtcaaggttatgaaagtattagtagccatggatgagtttcatggaattatttcgagttatcaagctaatagatatgttgaagaggcagttgcaagccaaattgaaactgcagatgtagttcaagtaccattgtttaatggaagacatgaattattagattctgtatttttatggcaatctgggcaaaagtatcgtataccagtacatgatgcagatatgaatgaagttgaaggtgtttacggacaaactgatacagggatgaccgttatcgaggggaatttatttttaaaaggtaaaaaaccaattgttgaacgaacaagttatggtttaggagaaatgattaaacatgcattagataacgacgcaaaacatgttgtaatttcattaggtgggattgatagttttgatgctggtgcaggtatgttacaagcattaggtgctcaattctatgatgacgaagggcgtgtcgtagatatgagacaaggtgctggtgtaattaaatatattcgtcgtatggatatgtcgaacttacaccctaaaatggaaacagcaagaattcaagtaatgtcggatttttcaagtcgattatatggtaagcaaagtgaaatcatgcaaacttatgatgcgcatcagttgaaccataatcaagcagcagaaatcgataatttaatttggtattttagtgagttatttaaaagtgaattgaaaattgcaattggtccagttgaacgtggtggtgctggtggtggaattgcagcagtcttgaatggactgtatcaagctgaaatattaaccagtcatgcattagtagaccaactaacacatttagaaaatttagttgaacaagcggatttaattatttttggagaaggattaaatgaaaatgatcagttgctagaaacgacaacattgcgtattgcagaactttgtcataaacatcaaaaggttgccattgcaatttgtgcaactgctgaaaagtttgatttatttgaatcacaaggggttacagcaatgtttaatacatttatcgatatgccggaaagttataccgactttaaaatgggattacaaattaggcattatactgttcagtctttaaaactgttgaaaacacattttaatgttgaggtttagtaaagaaggactaaattggtgatgctgtcatgatggttaataacatttatgatggttagcaaaacgaattagaagatcgaaagtatacgtaaaaaatatgaaaaatcacgctatcattgcactgaatgttagcgtgattttttatattaattaagcctgagttgaactagtatataatcgtttgtttttagttattttcagcgatatcttctacaattccaatgattacttgtactgctttttccatgacatcaatggatgcatattcatatgggccgtggaagttaccgcaacctgtaaagatgtttggagttggtaatcccataaatgacaattgtgaaccatctgtaccaccacgaataggttcagtgtttgctggaatatctaatttagcaaagacacgtttaggtatatcaataatatgaggcaatggtaatattttttctgccatattgaaatattgatccgatatatcaactttaactggataattttcaaaatgggcattgatatcgtcacgtatttctaaaatacgtttcttacgcaattcgaattgttttttatcatgatcacgaataatgtattgcaaagttgctttttcaacagttccttcaaagttcattaagtggtaaaagccttcatatccttctgttcgctccggaacttcactatcaggtagcaaactatcgaattgtccacctaaacgtattgcgtttaccattgcatttttagctgaaccaggatgaacattcacaccgtggcatgtaataaccgcttcagcagcgttaaagctttcatattgtaattctccatattgactaccatccatagtataagcaaaatcagcattgaagcggtcaacatcaaatttatgtggaccacgaccgatttcttcgtctggtgtaaatccaatgcgaatggtaccatgtttaatttctggatgttcttgtaaataacaaatagcttccataatttccacaatacccgctttatcgtctgcacctagtaacgatgtaccatcagttaccattaatgtatgaccaactaaactgttaagttctggaaatactttaggatctaagacacgtttagtattgcctagtttgtatggcttgccatcatagttttcaataatttgcggtttaacatttgaagcattgaaatcaggtgatgtatcaacatgagccaaaaaaccaacagttgggacgtcggcatcgatgttactttctaatgtagcaaataagtagccattttcatctaaatcagttggcaatcctaattgttgtaattctttttctaataaatgtaacaaatcccattgcttttcagttgaaggtgttgttgtagattttggatcagattgcgtatcaattgtcgtatatcttgttaatctatctatcaattggttcttcattatattcgaccccttaaactctattattcatgttgtaagattttttatatgtcttacctttgattttaccatacagttgtttgatacgtgtgtacaggtaatatagaatttcagaaactaatataccgaaagcaatcgcacctgaaatcagtgtaacttctaaaaatgtatttacagcacttgtataatcattcgatactaaaaaacgagtcgcttgataagctgcaccaccaggtactaatggtataatgcctggcactatgaatataattaccggtcgtttataactgcgactcatagtatgactcattaagcctaaaattaagcttcccaaaaatgaagcgccaacttttccaaactctaaatctaccgttaattggtaaatcgtccatgcaatggcacctacaaatccacatgctactaagagacgtttgggtgcattgaaaatgatagagaaaagtactgttgatataaagctgattgtaaaatgaaataaataaaatagcatgctttaacagtccttccttaaatgattaataaaacgattgcgacaccagcaccgattgcgaatgctgttaatgcagcttcaacaccacgagacatacctgcaagtaattcacccgctaataaatctcgaatggcattggtaattaatataccagggacaagtggcatgacactggctatagtaatgatatcttgattggttgcaatacctaatttagtaaatgtggctgcaatggatatgaccacagcggctgcaacaaactctgagaaaaatttaatttgtatatagcgttgcacaaagctgaatgttaaaaatgcggatccaccagcaatgactgcaatccaacaatctgatgcgacaccaccaaacatgaacaggaagaagccacatgcaatggcagctgcaaagaaattcgttaaaaaagaatattgtaatgatgcatgctgtaaatgaataaattcagatttagcttcatcaattgtgagttctttatttgatattttacgtgaaagactattcgttaaagcgattttctctaaatctgttgtacgctcttgtacacgaattaatcttgtacttgtacgatcatttaatgaaaaaataattgcagttgaactgacaaaactatatgtattatgaagaccataactatgtgcgatacggttcattgtatcttcaactcgatatgtttcagcacctgattcaagtaaaattctacctgcaattaatacaacatcaatcactttgttttcatctataattgtgattgaatctggcatatcaattcacctccaatgatatgtgttatttatttgaacaattgaagtttacaacttgttgttgcaactttcaatagtgagactttgtgttagtatgatgaacttgtatggttcaaatttaaataagaaaaactgttaatctttgctattatactatgatttaataatagcaaaggattaacagttttgtcgttgttatagattgatgatagggttaaacattactttatttcggccttgatttttggctacatgcaccatatcgtctgcatctttaaacactttacgctgtgattttggatcgtcatctgttaaataaccaacaccgatagacactgacaatttaataacttctttgtttggtaaatggaatgatgatttttcaacacccgaacgaatattttcagctaatttaacactttgatcaagtgaatagttgtgaatgacaactgagaactcttcgccaccatttctaaaaattttaaattgattcggcacatagtttttaagtaattgagacatttgttttaatacagcatcacctgatttgtgtgagtaggtatcattgacatctttaaatccatcgatatcgattaataataatgcgatactttgatgttctttttcagcttttcgtgaaatttcatttaaatgtctatcaaattcttttacattacctaagcctgttaagtaatcatatttatcttcgttttcataacgatttacgagtgagaagaaatgccaaatatcgacaaatgttatcgctgaagctaaagtgataattaatgaaattggtattaaaatgataacttccgatagtgtgtaaataggactcactaatgcgacaccaaataaaatgattattgtaacaacattaagtattaacaatgatagcacatcattttgttttaaaaatggtccaatagcacttgttactgcggcaataacaatcaacgtaacaccgtacataatcgagttgttaaatactacaatttcaacaattgctacaattactgtggcagataatgtatagaccatatttgtaaatctacctaaaaacaataaaggaacgaatgttaagtgaattaaataatcttcacgataagggatagggtagacagataataataatgatacgattgtcattaatacagtgacatatgccttagaaaaaaccatacgtttgttttctgaatactgtaagcgatggaataaatagattccagcgactataacagatatattgtatataaatgcttcgaacatgtctgaatcgactcctttaattgaccactagctattgtaagtgaaaacttacaatttgtcattagtttacatataaaattaatgtatgatatagactttgatgttaaaatgttgccttaaatgatatgatgaaaaaatgaataataggcgatatataagaaatgaatcgtatagttgtaaatatgatatcattgattgagcgaattaatttataataaagctataagatatacgtagaaaatagatatatcattctataaagacaatattaaataaatataacgttaaaaacaattaatatcgatgaaggtgaataaatggttacattattactagttgcagtaacaatgattgtcagtttgacgataacaccaattgttattgcaatatcgaaaagattaaatttagttgataaaccaaattttagaaaagtacacactaaacctatttcagttatgggtggtacggtgattctcttttcatttttaataggtatttggattggtcatcctattgaaacagaaatcaaaccacttattattggtgcgattattatgtacgtacttgggcttgtagatgatatctacgatttgaaaccgtatataaaattggctggtcaaattgctgctgccttagtagttgctttttatggtgtgactattgattttatttcgttgccaatgggtacaactattcattttggatttcttagtattccaattactgtgatttggattgttgctattacaaatgcaattaacttaattgatggactcgatggtttggcatcgggtgtttctgcaatcggactcattacaataggattcattgcaattttacaagctaatattttcataacgatgatttgttgtgttttattaggctctttaattgggtttttattttacaatttccatcctgccaaaatatttttaggtgatagtggcgctttaatgattggatttatcatcggattcctttctttactcggattcaaaaatattacaattattgcattgttcttcccaattgttatcttagcagttccattcattgataccttgttcgcaatgattcgacgtgtgaaaaaagggcagcatataatgcaagctgataaatcgcatttgcatcataagttattagctttaggctacacacatagacaaacggtattattaatctattcaatttctattttatttagtctttcgagcattatcttgtatgtatcgccaccattaggtgttgtattaatgtttgtattaatcatatttagtattgaattaattgttgaatttacaggattaatagataacaactaccgaccaatattaaatttaattagtcgtaagtcatctcataaagaggaatagattttaaaacggtaagtaataaaataaaaaatgatgtctgtacttttatgttgttataaagaaggcatactcacaaaaaacactagcatggaacgtgctttccaaattgcaaagtaacaatacgcaattagagttagccatcctaagctagtgctttttatttttattcagttggtatatcgaaaggtaactgctttggagtttcttcagtcaaatcgaaatttccagcagtcatttgatttaaaaaattaataaacgcttcatagtcacttttaacgacatcgatatagtagcttaccttatcagtgtaagtttggtttcttaacataaaatgagttgaggctaattcatattcaaatttaccagtttgatcataattcagtgttactatacatggtactgcttctcgtagttcgacacgtccgatatcataaatgacgtctctgacagcaccgctataggcgcgaattaaaccgccaccacctaatttaataccaccaaaatatcttgttactacgacacacgcattatgaacatcgagcttttttaatatgtctaacattgggacaccggcagttcctgtcggttcaccatcatcattcgctttttgaatattcatttcaggtccaatagtatatgcagaacaattatgagtggcatctttatgttctttttttattgcagcaataaatgctttagcttcatcttcattttgaacaggtttgatatgagcaatgaatcttgatttactaatcacattttcaataatgtgttcttttttaacagtaatgatattttgtgtcataataactccttaattcataagcttaagattatttaatcttcattatacactgaaaatgatatgactataaatcgtttgattgccattttctttttaactgaaatattgtatcattgctatgagtatattttaggaggacgactatgaaaattgctgtgatgaccgattctacaagttatctgtcgcaggacttaatcgataaatataatattcaaatagcgccattaagtgtgacttttgatgatgggaagaactttacagaaagtaatgaaatagcaattgaagaattttataataaaatggcatcgtctcaaacgattccaacaacaagccaaccagcaattggcgaatggattactaaatatgaaatgttaagagatcaaggttacacagatatcattgtcatttgcttatcaagtggaattagtggaagttatcaatctagttatcaagcaggggaaatggttgaaggtgttaatgtacatgcatttgatagtaagcttgcagcaatgattgaaggatgttatgtattacgtgctattgaaatggttgaagaaggatacgaaccacagcaaattattgatgatttaactaatatgcgtgaacacacaggtgcatatttaattgttgatgacttaaagaatttacaaaaaagtggtcgaattactggtgctcaagcatgggttggaacattattgaaaatgaagccagttcttaagtttgaagatggcaagattataccagaagaaaaagttcgtactaaaaagcgtgccattcaaacattagaaaagaaagtattagatattgtaaaagactttgaagaagtaactttatttgtcataaatggagaccatttcgaagatggacaagcgttatacaaaaagttacaagatgattgtccttcagcttatcaagtagcatactctgagtttggtccagttgttgcagcacatttaggttcaggtggattaggtttaggctatgttggcagaaaaataagattaacataattataaaattttaataaaagagtctatattgtaattggaaattatctctcgtatacatggctttaaatgttcatcatttgaatgtcaaaatgctaaagatataagaaaatcattataatattagactcttttttacgttgaaatgaggttttaagcattaaacattacgggaaattaattcatcctcatacttcacttactaatgaaaaaattaataaagaagtaacaggtgtcatcaaacaaaagtcaaactattattgtgttcaatgtgaaagtacaaatccaaagcatttttatcagtatgattcctcagtacattccaagaaaattgtatattgcagaaattgtatatcactgggtcgaatggataatgtaacaagatataaaataacagaaagttcgcaaagttcatcacaagcatattatcatctctcatttgaattatcggaacaacagtcttatgcctcagaacatattgttcgagccattagaatgagacaaacgattttgttatatgcagtaacaggtgcaggtaagacagaaatgatgtttcaaggcattcaatatgcaagacgacagggagataatatagctattgtgtcaccacgtgtagatgttgttgtagaaattagtaaacgtattaaagacgcatttcttaatgaagatatagacatactacaccagcaatcaagtcaacaatttgaagggcattttgttgtatgcacagtgcatcaactttaccgattcaaacagcactttgatactatttttattgatgaagtcgacgcctttcctttatcaatggataaaagtttacaacaagcattgaagtcatcttctaaagttgaacatgcaacgatttatatgacagcaacaccaccgaaacaacttctgtcagagattcccctcgaaaatataattaaattgccagctcgctttcataaaaaatcacttccagttcctaaatatcgctatttcaaacttaacaataataagattcagaaaatgttatatcgaattttacaagatcaaattaataatcaacgttatacactggtgttttttaacaatatagaaacaatgattaaaacattttcgatttataagcagaaaattactaaattaacatatgtccatagcgaggatgtttttcgctttgaaaaagttgaacaattaaggaatggacaatacgatgtcatttttactacgacaatattagaacgtggatttacaatggcaaatttagatgttgttgttatcgatgcacatcaatatactcaagaggctttaatacaaattgctggacgtgttggacgaaaattagaatgtcctactggaaaagtattgttttttcatgaaggtgtaagtatgaatatgattcaagctaaaaaagagattcaaaagatgaacaaattagcattaaaaagaggttggattgatgaataattgtttgagttgtggtgctaagttatatgaaaatataaccatttataatttgttcaagaaacctaatagattatgtgacagatgcaaagagaattgggacaatattaaacttgatattaaagcaaggcgatgttcaaggtgcttaaaatacttagatcaaaatgaagcgtattgtttagactgcaagtttctatcggcacactttaatttaatggaacaattatattgtcaatttcaatatgacggtttaatgaaagagatgatacatcagtataaattttcgaaagactattatttatgtgaattattggcacatttgattgaaataccacaaacatcttatgactatattgtgccaattccttcttcgccggcacatgatttatctagaacatttaacccggtagaagcagtactaaaagcaaaagggattcgctttgataagattttaaagatgtcaaatagaccaaaacagtctcatttaactaagaaagagcgtctggcagatgaaaatccatttattattgatacggaattagatttaaatggtaaggaaatattactcgttgacgatatttatacaactggattaacaattcatcgtgcagggtgtaaattatatgctaaaaaatatcagaaaattcaaagtgtttgcgtttgcacgatagcgtaaaaatgttaaaatataataaagagttaccaataaagaggtttaaggagagattactatgattagatttgaaattcatggagataacctcactatcacagatgctattcgcaactatattgaggaaaaaattggtaagttggaacgttattttaatgacgtaccaaatgcagtggcgcatgttaaagttaaaacttattcaaattcagctactaaaattgaagtaacaattccattgaaaaatgttacgttaagagctgaagagcgaaacgatgatttatacgcaggtattgatttaattaataataaacttgaaagacaagttcgaaaatataaaacacgtattaatcgtaagagccgtgatcgaggagatcaagaagtgtttgttgccgaattacaagaaatgcaagaaacacaagttgataatgacgcttacgatgataacgagatagaaattattcgttcaaaagaattcagcttaaaaccaatggattcagaagaagcggtattacaaatgaatctattaggtcatgacttctttgtattcacagacagagaaactgatggaacaagtatcgtttaccgccgtaaagacggtaaatatggcttgattcaaactagtgaacaataaattaagtttaaagcacttgtgtttttgcacaagtgcttttttatactctaaaagcaatttctaacaatttcatagttcgataatgtaatttgttgaatgaaacatagtgactatgctaatgttaatggatgtatatatttgaatgttaagttaataatagtatgtcagtctattgtatagtccgagtcgaaaatcgtaaaatatttataatataatttattaagaagtataattgcgttttgagaatatatttattagtgataaacttgttgacaacagaatgtgaatgaagtatgtcataaatatatttatattgattctacaaatgagtaaataagtataattttctaactataaatgataagatatattgttgtaggccaaacagttttttagctaaaggagcgaacgaaatgggatttttatcaaaaattcttgatggcaataataaagaaattaaacagttaggtaaacttgctgataaagtaatcgctttagaagaaaaaacggcaattttaactgatgaagaaattcgtaataaaacgaaacaattccaaacagaattagctgacattgataatgtcaaaaagcaaaatgattatttagataaaattttaccagaagcatatgcacttgttagggaaggctctaaacgtgtattcaatatgacaccatataaagttcaaattatgggtggtattgcaattcataaaggtgatatcgctgagatgagaacaggtgaaggtaaaacgttaacagcgacaatgccaacatacttaaatgcattagctggtagaggtgttcacgttattacagtcaatgaatacttatcaagtgttcaaagtgaagaaatggctgagttatataacttcttaggtttgactgtcggattaaacttaaacagtaagacgactgaagaaaaacgtgaagcatatgcgcaagacattacttacagtactaacaatgagttaggttttgactatttaagagataacatggtgaattattctgaagatagagtaatgcgtccattacatttcgcaatcattgatgaagttgactcaattttaattgatgaggcacgtacgccattaattatttctggtgaagctgaaaagtcaacgtcactttatacacaagcaaatgtttttgcaaaaatgttaaaacaggacgaagattataaatatgatgaaaaaacaaaatcagtacatttaacagaacaaggtgcggataaagctgaacgtatgttcaaagttgaaaacttatatgatgtacaaaatgttgatgttattagtcatatcaacacagctttacgtgcgcacgttacattacaacgtgatgtagactatatggttgttgatggcgaagtattaattgtcgatcaatttacaggacgtacaatgccaggacgtcgtttctcggaaggtttacaccaagctattgaagcgaaggaaggcgttcaaattcaaaatgaatctaaaactatggcgtctattacattccaaaactatttcagaatgtacaataaacttgcgggtatgacaggtacagctaaaactgaagaagaagaatttagaaatatttataacatgacagtaactcaaattccgacaaataaacctgtgcaacgtaacgataagtctgatttaatttacattagccaaaaaggtaaatttgatgcagtagtagaagatgttgtagaaaaacacaaggcagggcaaccagtgctattaggtactgttgcagttgagacttcagaatatatttcaaatttacttaaaaaacgcggtatccgtcatgatgtgttaaatgcgaaaaatcatgaacgtgaagctgaaattgttgcaggcgctggacaaaaaggtgccgttactattgccactaacatggctggtcgtggtacagatattaaattaggtgaaggcgtagaggaattaggcggtttagcggtaataggtacagaacgacatgaatctcgtcgtattgatgaccagttacgtggtcgttctggacgtcaaggtgataaaggggatagtcgcttctatttatcattacaagatgaattaatgattcgttttggttctgaacgtttacagaaaatgatgagccgactaggtttagatgactctacaccaattgaatcaaaaatggtatcaagagctgtagaatcagcacaaaaacgtgtagaaggtaataacttcgacgcgcgtaaacgtatcttagagtacgatgaagtattacgtaaacaacgtgaaattatctataacgaaagaaatagtattattgatgaagaagacagctctcaagttgtagatgcaatgctacgttcaacgttacaacgtagtatcaattactatataaatacagcagatgacgagcctgaatatcaaccattcatcgactacattaatgacattttcttacaagaaggtgacattacagaggatgatatcaaaggtaaagatgctgaagatattttcgaagtcgtttgggctaagattgaagcagcatatcaaagtcaaaaagatatcttagaagaacaaatgaatgagtttgagcgtatgattttacttcgttctattgatagccattggactgatcatatcgacacaatggatcaattacgtcaaggtattcacttacgttcttatgcacaacaaaatccattacgagactatcaaaatgaaggtcatgaattatttgatatcatgatgcaaaatatcgaagaagatacttgtaaattcattttaaaatctgtagtacaagttgaagataatattgaacgtgaaaaaacaactgagtttggtgaagcgaagcacgtttcagctgaagatggtaaagaaaaagtgaaaccgaaaccaatcgttaaaggcgatcaagttggtcgtaacgatgattgtccatgtggtagtggtaaaaaattcaaaaattgccatggaaaataaatgatataaaataactccttccaattaaacacctatagtttgtgttatgggaggagtctttttattttacaagcgttaaatactttaaaaaatgtgaagaagttgttaaacgttgttatgtacttagtttaaaaaaataggtttaagcatatgtctatgataaatgtactgttttttaacaataaaagtataaactaattgtcagtgggcttatatttcttaacattgttatttaacaaaattatgttaaaatttagcattataaaagatataaatcaatgacttgaattgaattataaataggagcgaaggctatggaattatcagaaatcaaacgaaatatagataagtataatcaagatttaacacaaattagggggtctctttgacttagagaacaaagaaactaatattcaagaatatgaagaaatgatggcagaacctaatttttgggataaccaaacaaaagcgcaagatattatagataaaaataatgcgttaaaagcaatagttaatggttataaaacactacaagcagaagtagatgacatggatgctacttgggatttattacaagaagaatttgatggagaaatgaaagaagacttagagcaagaggtcattaattttaaggctaaagtggatgaatacgaattgcaattattattagatggacctcacgatgccaataacgcaattctagagttacatcctggtgcaggtggcacggaatctcaagattgggctaatatgctatttagaatgtatcaacgttattgtgagaagaaaggttttaaagttgaaactgttgattatttacctggagatgaagcagggattaaaagtgtaacattgctcatcaaagggcataatgcttatggttatttaaaagctgaaaaaggtgtacaccgactagtacgaatttctccatttgattcatcaggacgtcgtcatacatcatttgcatcatgtgacgtgattccagattttaataatgatgaaatagagattgaaatcaatccggatgatattacagttgatacattcagagcttctggtgcaggtggtcagcatattaacaaaactgaatcggcaatacgaattacccatcacccctcaggtatagttgttaataaccaaaatgaacgttctcaaattaaaaaccgtgaagcagctatgaaaatgttaaagtctaaattatatcaattaaaattggaagagcaggcacgtgaaatggctgaaattcgtggcgaacaaaaagaaatcggatggggaagccaaattagatcatatgttttccatccatactcaatggtgaaagatcatcgtacgaacgaagaaacaggtaaggttgatgcagtgatggatggagacattggaccatttatcgaatcatatttaagacagacaatgtcgcacgattaatatatattttaagggagtgggacagaaatgataaagagccactaatgatttattatgtagtggttcttacacattagccacagctaatgtgtacttaaaaataggaatacatgagtaaaactcatgcataagaaatactaatttctatagaaaaagtatttctttatcgtcgtcccaccccaacttgcattgtctgtagaaattgggaatccaatttctctttgttggggcccacaccccaacttgcattgcctgtagaatttcttttcgaaattctctttgttggggcccctgactagaattgaaaaaagcttgttacaagcgcattttcgttcagtcaactactgccaatataactttgtagagcattgaacattgatttatgtctcaggctctttggtttttttaaaggtagctaaataaattgtaaattagattttggaatatgatttgtttatgaatatttaagtacaattcggtggtttttgacgaaatattatcctttataaaagtttcgtttgttaaacaaatctatgtactgtgcattaagtaatattaccttcaacgaatttcaatgtattgaattaaatgttgaaaacgttgtcaatcatttgcagtgaatacattttacaccgagtaggtagtttgcattcttttttatattgttaaccatttgattacatcgttataacaatagcttttgacaaaatgtattgtgctatagtatttgcatacttaaaatactaacagcaaaggaatgacagcaagatgaaaaaatctcttacagtgacggtttcgtcagtgttagcttttttagctttaaataatgcagcacatgcacaacaacatggcacacaagtaaaaacacctgttcaacataattatgtatcaaatgttcaagcacaaacgcaatcaccgacaacttatacagtagttgctggcgattcattatataagattgctttagagcatcacttaacgttgaatcaattatattcatacaatcctggtgtaacacctttaatttttcctggtgacgtgatttcacttgtgcctcaaaataaagtgaaacaaactaaaacggttaaatcaccagtaagaaaagcaagccaagctaaaaaggtagtacaacaacctgtacaacaagcgtctaaaaaagtagtagttaagcaagcacctaagcaaacagtagctaagacagttaatgtagcatacaaacctgctcaagtacaaaaatcagtaccaactgtacctgttgcacataactacaataaatcagttgctaacagaggaaacttatatgcttatggaaactgcacatattatgctttcgatcgtcgtgcacaattaggtagaagtataggaagtttatggggcaatgcaaataactggaattacgcagcaaaagttgcaggatttaaagtagataaaacaccagaagttggcgctattttccaaacagctgctggaccatatggacatgttggtgttgttgaatctgtaaatcctaatggaacaattactgtttcggaaatgaactatgctggatttaatgttaaatcttcaagaacaattttaaatccaggaaaatataattacatccactaagtaacatatcaagacaagactatcctcttaacctgtttaagtaacaggttgagaggattttttggtatcatctaatcagacttatataaagaagatatttaaatgatatttaattgaatgatatgtaaaaagaaagtataatttatgattaattaatggaggaggtaattgaaatgggtgtacatcaatattttaaaagattatcagatatggaaagacttataagattacctggaaaatttaaatattttgaacacaatgttgcagcgcactcctttaaagtaactaaaattgctcaatatctagcaacagttgaagaatatcatggacgaaagattaattggaaaagcttatatgaaaaagcattaaatcatgatttcgctgaagtgtttactggtgatataaaaacacctgttaaatatgcgagtagtgaattaaaaaaattattttcgcaagttgaagaagaaatggtagagacctttattgaagaagaaattccattacaatatagagatgtttataagcaacgactgcaagaaggtaaagatgattcattagaaggccaaatactttcagttgctgataaaattgatttgctttatgaaacatttggagaaatacaaaaacgtaatcccgaagaattatttttcgaaatttatgaaatgagtctagaaacaattattcaatttgaccatttagcatctgtacaagattttattaataatatcattccagaaatgttgactgaaaactttatacctagaacagaattaagagaaacaactatgaacattttaaataaaagaaaagaggaaaatgaatgatatggtattttagcgcagcattctttccatgtgtcttggtagtattgtttagtgtaataacaagaagtaaatgggtcggtactattctgacattaattttaattggtgcctcaatctataaagagtatttccataacgagtggattatttttattgatgtggtgtcattattagctggttatttaattatagatcaactcgaatttcataaacatcaagatgaagatcgctaagattaactttaaaataatgtttcaaacaaatttgttgaaacaaaatgatgattaatataatgtgtatttacatactaaaaataacaagataaacgatttgatttaaggcaagcatagttagcacaactatgtttgtttttctttgttcgacatttttacgaacaaacgtttgctttttgtgtgactactttgctaaaatatgtaatgagaaagcgaagagttgagcggaaatataaataatacgttgaaagaggaggcatatgtgactatggttgaacattatccttttaaaatacattctgattttgagcctcaaggtgaccaaccgcaagcaattaaggaaatcgtggaaggtattaaagcggggaaaagacatcaaactttattaggtgcaactggcacagggaaaacatttacgatgagtaatgttattaaagaagttgggaaaccaacgttaattatcgcgcataacaaaacattagcaggacaattatatagtgagtttaaagaattttttcctgaaaacagggtggaatactttgtaagttactatgattattatcaacctgaggcatacgtaccgtctactgacacttttattgaaaaagatgcctcaatcaatgatgaaattgatcaactacgacattctgctacaagtgcattatttgaacgcgatgatgtaattattattgctagtgtaagttgtatatatggtttaggtaatcctgaagaatataaagatttagtagtaagtgttcgagttggtatggaaatggatagaagtgaattacttagaaaacttgtagatgtgcaatatacacgaaatgacatcgatttccaacgaggaacgtttcgagtgcgtggtgatgttgttgaaatattcccagcctctaaagaagaactttgtataagggttgagtttttcggcgatgagattgaccgtattcgagaagttaactacctaactggtgaagtgttgaaagaaagagaacattttgcgatattcccagcttctcacttcgtaacacgtgaagaaaagttgaaagttgcgattgaacgtattgaaaaagaattggaagaacgattgaaagaattacgagatgagaataaattactagaagcgcaaaggttagaacagcgtaccaactatgatttagaaatgatgcgagagatgggattctgttcaggaattgaaaactattccgtacatttaactttgcgaccactgggttcgacaccatatactttattggattactttggcgatgattggttagtaatgattgatgaatcacatgtgacattaccgcaagttcgaggcatgtataacggagacagagcgcgtaaacaagttttggtggatcatggatttagattaccgagtgcattagataaccgtcctcttaaatttgaagaatttgaagaaaagacaaaacaacttgtgtatgtatctgcaacgcctggaccatacgaaattgaacatacggataagatggttgaacaaattattcgtcctactggtttactggatcctaagattgaggttagacctactgaaaatcaaattgacgatttattaagtgaaattcaaacaagggttgagcgtaatgaacgcgtacttgttacaacgctcactaaaaagatgagtgaagatttaaccacatacatgaaagaagcgggtattaaagttaattatctgcattcagaaatcaagacattagaacgaatcgaaataattagagacttacgaatgggtacatatgatgttatcgtaggtattaatttattaagagagggtattgatataccagaagtttctctagttgtcatattagatgcagataaagaaggatttttacgttctaaccgctcattaattcaaacaataggtagagctgcgcgtaacgataaaggtgaagtcattatgtatgccgataaaatgactgattcgatgaagtatgcaattgatgagacacaacgtcgtcgagaaatacagatgaaacataatgaaaaacatggtattacacctaaaacaattaataaaaaaatacatgatttaattagtgctactgttgaaaatgacgaaaataatgacaaagcacaaactgtgatacctaagaagatgacgaaaaaagaacgtcaaaagacaatcgacaatatagaaaaagaaatgaaacaagcagcgaaagatttagatttcgagaaagctacagaattaagagatatgttatttgaattaaaagcagaagggtgacaagtaaatgaaagaaccatccatagtagtaaaaggtgctcgtgcgcataacttgaaagatattgatatcgaactacctaaaaataaattaattgttatgacaggattatctgggtcaggtaaatcgtcattagcattcgatactatatatgctgaaggacaacgacgttatgttgaatcattaagtgcctatgcgcgtcaatttttagggcaaatggacaaaccagatgttgatactattgaaggattatcgccagcaatttcaatagatcaaaaaacaacaagtaaaaatccaaggtcaactgttgcaacagtaacagaaatatatgattatatacgtttgttatatgcacgtgttggtaaaccttactgtccaaatcacaatatagaaattgaatcgcaaacagtacaacaaatggttgaccgcattatggaattagaggcacgtacaaagattcaattattagcacctgtcatcgctcatcgtaaaggtagtcatgaaaagctaatcgaagatattggtaaaaaaggttatgtacgtttaagaatcgatggcgaaattgttgatgtaaatgatgtacctacattagataagaacaagaatcatacaatagaagttgttgtagaccgattagttgttaaagatggaattgaaacacgactagctgactctatagaaactgcgttagagctttcagaaggacaattaacagtcgatgtcattgacggggaagaccttaagttttcagaaagccacgcttgtcctatatgtggattttcaatcggagaattagaaccaagaatgtttagctttaacagtccttttggtgcttgtccaacatgtgatggcttaggtcaaaagttaacagtcgatgtagacttggttgttcccgacaaagataagacgctaaacgaaggtgcaatagaaccatggataccgacgagttctgatttttatccaacattgttaaaacgtgtttgtgaagtttataaaatcaatatggataaaccttttaaaaagttaacagaacgtcaacgtgatattttattgtatggttcgggtgacaaagaaattgaatttacatttacacaacgtcagggtggtactagaaaacgaacaatggttttcgagggtgtagttcctaatataagtagacgattccatgaatctccttcagaatatacacgtgaaatgatgagtaaatatatgactgaactaccttgcgaaacttgtcatggaaagcgattgagtcgtgaagcgttatctgtttatgtaggtggtttaaatattggtgaagtagtcgaatactcaattagtcaagcgctgaactattataaaaacattaatttgtcagaacaagatcaagcgattgcaaatcaaatattgaaagaaattatttcccgactcacttttttaaataatgtgggacttgaatatttaacgctaaacagagcttcaggtacactttcaggtggtgaagcacaacgtattcgattggcaacgcaaattgggtcgcgtttgactggtgtcttatatgtattagatgagccatcaattggactgcatcaaagagataatgatcgattaattaatacacttaaagaaatgagagatttaggaaatactttaattgtagttgaacacgatgatgatacaatgcgtgcggctgattacttagtggacatagggcctggtgctggtgagcatggaggacagattgtgtctagtggtacacctcaaaaggtaatgaaagataaaaaatctttaacaggacaatacttgagtggtaagaaacgtattgaagtacctgaatatcgcagaccggcttcagatcgtaaaatttctatacgtggagctagaagtaacaaccttaaaggggttgatgtggacataccactttcaatcatgacggtcgttacaggtgtatcaggttctggtaaaagctcattagtaaatgaagtattatacaaatcattagctcaaaaaatcaataaatctaaagtaaagccaggattgtacgataaaattgaaggtattgatcaacttgataaaattattgatattgatcaatcaccgataggtagaacgccacgctctaatccagcaacatatactggcgtgtttgatgatatacgtgatgtgtttgcgcaaacaaatgaagctaaaattcgaggatatcaaaaaggtcgttttagttttaatgtaaaaggtggacgctgtgaagcttgtaaaggtgacggtattattaaaattgaaatgcattttttacctgatgtttatgttccttgtgaagtgtgtgatggtaaacgatataatcgcgagacactagaggttacttacaaaggtaaaaatattgctgacattttagaaatgactgttgaagaagcaacacaattttttgaaaatattcctaagattaagcgcaagctacaaacactagttgatgttggtcttggatacgtcacattaggtcaacaagctacaacattatcaggtggtgaggctcaacgtgtgaaacttgcatctgaacttcataaacgttcaactggtaaatctatttatatcctagacgaaccgacaacagggttacatgttgacgatattagtagattattaaaagtattaaaccgattagttgaaaatggtgacactgttgtaattattgaacataacctagatgttatcaaaacagcagactatattatagacttaggtcctgaaggtggtagtggcggtggtactattgttgcgactggaacacccgaagatattgctcagacaaagtcatcatatacaggaaagtatttaaaagaagtacttgaacgagataaacaaaatactgaagataaataagattaaaagaagtgaaggatgttgtaaatttatccttcacttctttttattaatttagtaatgaatagtagaaagaaaagatgcgtaaaaagaattatgttaagataaggtcaatctagagtagctaaacataaatcgaaactgggagcgggacagaaatgataaagaatcactaatgatttattatgtagtggttctttgtcattagccacagctattgtgtacttaaaaataggaatgcatgagtgcaactcatgcataagaaatactaatttctaaagaaaaagtatctctttatgttgggggcccgccccaacttgcattgtctgtcgaaattgagaatccaatttctctgtgttggggccccgccaactaattcgaatttatcattttagagcttaggtcattgatttatggctcggacttttatggcgatatgaaacatgtaaattaagcaagcaataaattaatgattgatattgacttgtaaaataataacaataatgaacaattaatatttattttagcttttcaatgtagattggtgttatatttttgatatgataagaagagatgtaagagtagggataaatacaattgaggtgaacccatgttaacgacagaaaaactagttgaaacattaaagttagatttaatcgctggtgaagaagggctatcgaagccaattaaaaatgctgatatatcaagaccgggcttagagatggcaggttatttttcacattatgcgtcagatagaatacaactattaggaacaacggaactatcgttttacaatttattaccagataaggatcgcgcaggtcgtatgcgtaaactatgcagaccagaaacgcctgcaattattgtgacacgtggattgcagccaccagaagaattagttgaagctgcaaaagaattaaatacgccacttatagttgctaaagatgccactacaagtttaatgagtcgcttaacgacgtttttagagcatgcacttgcaaagacgacatctttacatggagttttagtagatgtttacggtgttggtgtactaattaccggtgattcaggaataggtaaaagtgagactgcgttagaattagtgaagcgtgggcatagattagtagcagatgataatgtagaaatacgtcaaattaataaagatgaactaatagggaaaccaccaaagttaatagaacatctattagaaatacgtggactaggtattatcaatgttatgactttatttggcgcgggttcaatattaactgaaaaacgaattagattaaatattaatttggaaaactggaacaagcaaaagttatatgaccgcgtaggtcttaatgaagagacgttaagtattttagatactgaaataactaaaaaaacaatacctgtaagacctggtagaaatgttgcggtaattattgaggtcgctgcaatgaactatcgattaaatatcatgggcattaacactgccgaagaatttagtgaaagattaaatgaagaaattatcaagaacagtcataagagtgaggagtaggttgaatgggtggtattgtatttaactatatagatcctgtggcatttaacttaggaccactaagtgtacgatggtatggaattatcattgctgtcggaatactacttggttactttgttgcacaacgtgcactagttaaagcaggattacataaagatactttagtagatattattttttatagtgcactatttggatttatcgcggcacgaatctattttgtaattttccaatggccatattacgcggaaaatccaggtgaaattattaaaatatggcatggtggtatagcaatacatggcggtttaataggtggctttattgctggtgttattgtatgtaaagtgaaaaatttaaacccatttcaaattggtgatatcgttgcgccaagtataattttagcgcaaggaattggacgctggggtaactttatgaatcacgaggcacatggtggacctgtgtcacgcgcttttttagaacaattacatttgcctaattttataatagaaaatatgtatattaacggccaatattatcatccaacattcttatatgaatccatttgggatgtcgctggatttattatcttagttaatattcgtaaacatttaaaattaggagaaacattctttttatatttaacttggtattcaattggtcgattctttatagaaggattacgtacagatagcttaatgctcacaagtaatattagagttgcacaattagtatcaattcttttaattttaataagtataagtttaattgtatatagaaggattaagtataatccaccgttgtatagcaaagttggggcgcttccatggccaacaagaaaagtgaagtagtgatattttgagaaaatttttatcaaaagaatatcatcgtacaaaccctttatggcatgtataccgtcttgttaaattttcgaaagtttttaagaatgtaatcatcattgaattttcgaaatttattccaagtatggtactgaaaagacatatatataaacaaattttaaatattaatatcggtaatcaatcgtcgatagcttataaagtaatgttagatattttttatccagaactgattacgattggtagtaacagtgttattggttacaatgtaacaattttgacgcatgaagcattagttgatgaatttcgttatggaccagtgacgataggatctaacactttgattggtgcaaatgctaccattttacccggtataacgattggtgacaatgtaaaagttgcagctggtacggttgtttcaaaagatataccggataatggatttgcatatggcaaccctatgtatataaaaatgattaggaggtgacaattttatggcgcaaaagaataataatgtaattccaatgacttttgatgatgcattttatcgtaaaatggctaatcagaagtttaaacaaagagaatataaacgagctgctgaatactttgaaaaagtgttagaattgtcacctgatgatctggaaattcaaattgattatgcacaatgtctagtgcaacttggtattgctaaaaaagcagaacatttattttatgacaatattatttataataggcatctagaagatagcttttatgaattgagtcagctcaacattgaagttaacgaaccaaacaaggcattcttgtttggtattaattatgttattgttagcgacgaccaagattatagagatgaattagatcaaatgtttgatgtgaaatatcaaagtgaagaacaaattgaacttgaagctcaattgtttgtagttcaaatactattccaatatcttttttctcaaggtcgattaaaagatgcaaagaattatgtcttacatcaaccacaagaagttcaagatcatcgtgtcgtacgtaatttactggcaatgtgttatttatatctcggcgaatatgatacggctaaagcattgtacgaagcactattaaaagaggatagtacagatatatatgcattatgccattatactttgctactttataacactaaggaaaatgaacaataccaaaagtatttaaaaatattaaataaagttgtacctatgaatgacgatgaaagttttaaattaggtattgttttaagttatttaaagcagtatcgtgcttcacaacaattgttgtaccctttatataaaaaagggaaatttttatcaattcaaatgtacaatgctttagcatataattattattatttaggtgaagaagacgaaagtcattactactgggataaattgaagcaaatttctaaagtggaaattggacatgctccttgggtaattgaaaatagcaaagaagtttttgaccaacatattttgccattacttcaaagtgatgacagtcattatcgtttatatggtattttttttattggatcaattaaatggtaaagaaattgtgatgacggaaagtatttggcaggttctggaaaatctaaataattatgagaaattgtatttaacgtatttagttcaaggtttaacgctcaataaattagacttcattcatcgcggcttgttaacgctttaccataatgaattatttgtaagtgaaaatgatttaatggttgcatggattaatcaaggtgaactcataattgctgaaaaagtagatttaactgatgttgagccatatatcggtgcgtttatttatttgtattttaaaaatcaacctcgaaacgttacaaagaagcaaattacaacatggttaggcataacacaatataaactgaacaaaatgattgaatttctcttgagcatatagatttatgaaaagttagatttattatataatgcgcataatgattaataatgaggaggcgttaataaaatgactgaaatagattttgatatagcaattatcggtgcaggtccagctggtatgactgctgcagtatacgcatcacgtgctaatttaaaaacagttatgattgaaagaggtattccaggcggtcaaatggctaatacagaagaagtagagaacttccctggtttcgaaatgattacaggtccagatttatctacaaaaatgtttgaacacgctaaaaagtttggtgcagtttatcaatatggagatattaaatctgtagaagataaaggcgaatataaagtgattaactttggtaacaaagaattaacagctaaagcggtcattattgctacaggtgcagaatacaagaaaattggtgttccgggtgaacaagaacttggtggacgcggtgtaagttattgtgcagtatgtgatggtgcattctttaaaaataaacgcctattcgttatcggtggtggtgactcagcagtagaagagggaacattcttaactaaatttgctgacaaagtaacaatcgttcaccgtcgtgatgagttacgtgcacaacgtattttacaagatagagcattcaaaaatgataaaatagactttatttggagccatactttgaaatcaattaatgaaaaagacggcaaagtgggttctgtgacattaacgtctacaaaagatggttcagaagaaacacacgaggctgatggtgtattcatctatattggtatgaaaccattaacagcaccatttaaagacttaggtattacaaatgatgttggttatattgtgacaaaagatgatatgacaacatcagtaccaggtatttttgcagcaggagatgttcgcgacaaaggtttacgccaaattgtcactgctactggcgatggtagtattgcagcacaaagtgcagcggaatatattgaacatttaaacgatcaagcttaaatcgaagtcgaattaagatgttgcgttgtaaattatttggatatttattttaatagtgacatcacattgttaaaataatgtcttacttttaaattaaagcaaattatatagaaaactagaacttagtacgtatcatttgtgcgtttcaatgagttctagtttttttatatgttatattaaacttataactttatgggagtgggacagaaatgataaagagccactaatgatttattatgtagtggttcttacacattagccacagctaatgtgtacttaaaaataggaatacatgagtaaaactcatgcataagaaatactaatttctatagaaaaagtatttctttatcgttgtcccgccccaacttgcacattattgtaagctggcggaaagtcagcttctgtgttggggccccaccccaacttgcacattattgtaagctggcggaaagtcagcttctgtgttggggccccaccccaacttgcacattattgtaagctgactttacgtcagcttctttgttggggcccctgactataattgaaaaaagcttgttgcaagcgcattttcattcagtcaactactagcaatataatattatagaccctaggacattgatttatgtcccaatctccttttaaatgatgtatatttttagaaatttaatctagacatagtttaaaataaatataaaacatcgttgcttaattttgtcatagaacatttaaattaacatcatgaaattcgttttggcggtgaaaaaataatggataataatgaaaaagaaaaaagtaaaagtgaattattagttgtcacaggtttatctggcgcaggtaaatctttggttattcaatgtttagaagacatgggatatttttgtgtagataatctaccaccagtgttattgcctaaatttgtagagttgatggaacaaggaaatccatccttaagaaaagtggcaattgcaattgatttaagaggtaaggaactatttaattcattagttgcagtagtggataaagtcaaaagtgaaagtgacgtcatcattgatgttatgtttttagaagctagtactgaaaaattaatttcaagatataaggaaacgcgtcgtgcacatcctttgatggaacaaggtaaaaaatcgttaatcaatgcaattaatgatgagcgagagcatttgtctcaaattagaagtatagctaattttgttatagatactacaaagttatcacctaaagaattaaaagaacgcattcgtcgatactatgaagatgaagagtttgaaacttttacaattaatgtcacaagtttcggttttaaacatgggattcagatggatgcagatttagtatttgatgtacgatttttaccaaatccatattatgtagtagatttaagacctttaacaggattagataaagacgtttataattatgttatgaaatggaaagagacagagattttctttgaaaaattaactgatttgttagattttatgatacctgggtataaaaaagaagggaaatctcaattagtaattgccatcggttgtacgggtggacaacatagatctgtagcattagcagaacgactaggtaattatctaaatgaagtatttgaatataatgtttatgtgcatcatagggacgcacatattgaaagtggcgagaaaaaatgagacaaataaaagttgtacttatcggtggtggcactggcttatcagttatggctaggggattaagagaattcccaattgatattacagcgattgtaacagttgctgataatggtgggagtacagggaaaatcagagatgaaatggatataccagcaccaggagacatcagaaatgtgattgcagctttaagtgattctgagtcagttttaagccaactttttcagtatcgttttgaagaaaatcaaattagcggtcactcattaggtaatttattaatcgcaggtatgactaatattacgaatgatttcggacatgccattaaagcattaagtaaaattttaaatattaaaggtagagtcattccatctacaaatacaagtgtgcaattaaatgctgttatggaagatggagaaattgtttttggagaaacaaatattcctaaaaaacataaaaaaattgatcgtgtgtttttagaacctaacgatgtgcaaccaatggaagaagcaatcgatgctttaagggaagcagatttaatcgttcttggaccagggtcattatatacgagcgttatttctaacttatgtgtcaatggtatttcagatgcattaattcattctgatgcgcctaagctatatgtatctaatgtgatgacgcaacctggggaaacagatggttatagcgtgaaagatcatatcgacgcgattcatagacaagccggacaaccgtttattgattatgtcatttgtagtacacaaactttcaatgctcaagttttgaaaaaatatgaagaaaaacattctaaaccagttgaagttaataaggctgaactagaaaaagaaagcataaatgtaaaaacatcttctaatttagttgaaatttctgaaaatcatttagtaagacataatactaaagtgttatcgacaatgatttatgacatagctttagaattaattagtactattcctttcgtaccaagtgataaacgtaaataatatagaacgtaatcatattatgatatgataatagagctgtataaaaatgaaaatagacagtggttctaaggtgaatcatgttttaaataagaaaggaatgactgtacgatgagctttgcatcagaaatgaaaaatgaattaactagaatagacgtcgatgaaatgaatgcaaaagcagagctcagtgcactgattcgaatgaatggtgcacttagtctttcaaatcaacaatttgttataaatgttcaaacggaaaatgcaacaacggcaagacgtatttattcgttgattaaacgtgtctttaatgtggaagttgaaatattagtccgtaaaaaaatgaaacttaaaaaaaataatatttatatttgtcgtacaaagatgaaagcgaaagaaattcttgatgaattaggaattttaaaagacggcatttttacgcatgaaattgatcattcaatgattcaagatgacgaaatgagacgtagttacttgagaggagcttttctggcaggtggctcagtgaataaccctgaaacatcttcataccatttggaaattttttctcaaaatgagagtcatgcagaaggcttaacgaaactaatgaatagttatgagttgaatgccaaacatttagagcgaaaaaaaggaagtattacgtatttaaaagaagcggaaaagatttcggattttcttagtttgataggtggctatcaagcgttattaaaatttgaagacgtacgtattgtaagagatatgcgtaattctgttaaccgactcgttaattgtgaaacggcaaatctaaataaaacagttagtgctgcgatgaaacaagttgagagcattaaattgattgataaagaaattggtattgaaaatttaccagacaggttgagagagattgctagaattcgagtagaacatcaagaaatttcgttgaaagagcttggagaaatggtatcaactggtccaatttcaaaatcaggtgtaaatcatcgattaagaaaacttaatgatttagccgataagattagaaatggtgaacaaatagaattataagtaagaaggtgtttttggtattgaattatcaaaaataccttttttatgattaaaaagtgtttaatgaataatagtcgactaaccattaaattaagctgggaagtttaatgaaggaaattcaataaccaagcgttacctaattttctcattaagtagcatcatatatatcaatttggtcataagaaaatatgaatgtgataattaattgagtccctgaaagtccctgatcatagacaaaaaatcaacataaaaagaatcccgacattgcgggattctctgtattgaaaagtattgtattttattaaaatgcctccttgaagggaatcgaacccctatcttaagaaccggaatcttacgtgttatccattacaccacaaggagtaaatgtgttaatcaaatcactgtactatgagaagtaaaataagtacaatctaaaatagatattatcagtttacaaaggaaagagacaagcgtcaaacaatgtaactatttaaagtcaaagtgtttgaccaaatttgacttaatatgtaaaataatgagtaacagttattacaaggaggaaatatagatgaatttaattcctacagttattgaaacaacaaatcgcggtgaacgtgcatacgatatatactcacgtttattaaaagaccgtattattatgttaggttcacaaattgatgacaacgtagcaaattcaatcgtatcacagttattattcttacaagcacaagactcagagaaagatatttatttatacattaattcacccggtggaagtgtaacagctggttttgcgatttatgatacaattcaacacattaaacctgatgttcaaacaatttgtatcggtatggctgcatcaatgggatcattcttattagcagctggtgctaaaggtaaacgttttgcgttaccaaatgcagaagtaatgattcaccaaccattaggtggtgctcaaggacaagcaactgaaattgaaattgctgcaaatcacattttaaaaacacgtgaaaaattaaatcgcattttatcagagcgtactggtcaaagtattgaaaaaatacaaaaagacacagatcgtgataacttcttaactgcagaagaagctaaagaatatggcttaattgatgaagtgatggtacctgaaacaaaataattcaaagtaaagagtggactaagcagtctgctctttttgtatgattaaaccaatttataaataaatcgttaaaaatattttgagtaaaagcaaaaaataacgggtaaaaatatttataagaatttaattagacacgttacgtctgcggttctacaatctaaaaaatataaaggatgattttatgaaaggcattgaattacttaacaatccatttttaaacaaaggtacagcttttactaacgaagaaagaaaacagttagggcttgaaggattattacctgcgaatgttcgaactttagaacaacaagcagaacaatgttatgaacaattcaaggcgaaacaaaccgattttgagaaacgtttatttttaatggcaatttttaatcgtaatcgtacattgttttacaaattgacttctgagcatttagttgaatttatgccaattatttatgaccctgttattgcacaatcgattgaacaatataatgagaatttcagtagaccccaagatgcagtatttttatctgttgatagacaagaccaaattgaacaagaattgcgcaacgttgcaaatggcagagatattcgattaatcgtagtaacagatgcggaaggtatattaggtatcggcgattggggcgttgatggtgtagatattgcgataggaaaattaatagtatatacagcggcagctggaataaatcccgcacaagtattacctgtatctttagatgtaggtactaataatgaacaattactgaatgatgaactttatttaggaaatcgtcataaacgtgtcgatgatgagacatattacacatttgtagataaatttgtgagtgcagtgcgtaaagaatatcctaatgcactattacattgggaagattttggtagagggcatgctaaaaatattttagataaatatgaagatactttaccaacatttaatgatgatattcaaggtacaggtatagttacattagccggcgtactaggtgcattaaatatttctaaagtagactatacgaatcagacgttcttagtttatggtggtggtacagctggtatgggtattaccaatattttaaaagatgaactaattaaacaggatgtttcagaagataaagcaaatcagcatttctatattatggataaacaaggattgttgtttgatgatatggatgacttaactgaagctcaacaagtatttgctaaaaataggaatgaattttcaaatacagtaaactggaaaaatttaaaagaagtaattgaaaatattaagcctactgttttaatcggtacatcaactcaaacaggtgcatttacagaagatgcagtaaaagagatgttaaaacatacagaacgtccaatgattttcccattgtctaatcctacaaaattagcagaagcaactgcacaagatttattaaaatggactaatggaaaagcattaattggaactggtatcccatataatgacattgaatacaatggtgtgaattacagtattggtcaagcaaataatgcattgatgtatcctggtttaggtttgggtcttattgcgtcaaaagcgaagaaagtaaatcaacagattctatcagctgcgagtcatgcacttggtggcatggtcaatccagatgaaccaggagctgcagtcttaccacctgttgagaaaatacatcaatgttctcgtgccatagccaaagcggttgcacaaagtgtcattgatcaaggattaaacgctgaaactattgatgatattgatgaagcaattgaagctgaaatttggtatcctgaatacaaatcatacatttaattttataaagtagtaaaaggtcatttgaacattttgtttcaagtggccttttcgtatttactttaaaattaatcaaccaatattcataagtgactttaaagttatatctatatgtaatatcagcaaatagaaaagtctagagagatttaacgaattatctcctagactttttgcttgaagtggagtaggagagatcaatgtcccactcacttactaattaaatcttcaagtgccatttttaaattactatatttaaattggaatcccaatgcttgaattttattaggtaatactttttgagtatccaatactactgttgacatttgaccaagtatgagacgcattgcaagacttggtacccaagtttcatgaggcttatgcatagctcttgctaaagtgtagccaaataaattttgacgctcaggtataggtgcagttaaattaaacggaccactagctgactcgttatttattaaaaataaaatagcttgaattaaatcattgatatgaatccatgaataccattgttgaccagaacctaatttaccaccaatgtaatattcgtatggtagtttcattgtttgtaacgcaccgccttcattcgataaaattataccgaaacgaccgatgacaactcgtgtacctaattgttcaaattgttgtgcgaaacgttcccattgatacacaatatctgataagaaatcaaatggtaaagttttataaacttctgtgtaactcataaataaatcaggaggatagtaaccagtggcactagcattaaataaaactttaggtgctttattacgtgatttaaacaattcatataaagcttgcgtagattgaattctacttagcattagcgtttgtttatattccggtgtccatcgtttattcaatgtagcacctgctaagttgatgaccacatcaatattttgaggaactttgtgttcccacccagatttagcccagttgacatatgaaattttcttattatttgaaatttggtcgtgtcgcgttaatatcgtgatatgtgaatctgattttttgatttcattaactaattgagatccaaccataccagtcccaccagtaattaagtattgtttcattatcattcaccccatgtaattttgtatttagttactatttaataatcattattgttgttcaaaggttatacattatttagacaataatatgtcaataactttttttgaattgtattttaataaaaatgatataagttataataaaggtgtaccttcgataacgaataaacatctcttaaaagtatgtgtaaaacgctgcatgatacaaacgaaggtaaaaatttgactccctttagtagtggacccgtacgtttatcgtgcgggtcgtttttatttatatcttattcccgttatacatcaattcaaagcattaattttttaaacaaatttaagaatagatagtaatataacaatctaaacataaaaacttttaacacaacacttaaactaatgctttaattttcaatacgtagctataatttgttgtaaaatcaaaaaggttaatatgttaattttcaaaaaaaggctcaaaatatgtttgatttagttattaaatgttaagatatataagactactatttctttgtaaaaatgaatccgatttacgagtgagtaatagtgaatatagttttaagttgaagaaggcaaaaagagtaaatgtttattaatgtttgtagaaacaaggtaagcaaattagttgtgaaaatgttaatagttacgtgataatttctatatttaaattagtttgaagtgagggagagtatgtcgaatcaaaattacgactacaataaaaatgaagatggaagtaagaagaaaatgagtacaacagcgaaagtagttagcattgcgacggtattgctattactcggaggattagtatttgcaatttttgcatatgtagatcattcgaataaagctaaagaacgtatgttgaacgaacaaaagcaggaacaaaaagaaaagcgtcaaaaagaaaatgcagaaaaagagagaaagaaaaagcaacaagaggaaaaagagcagaatgagctagattcacaagcaaaccaatatcagcaattgccacagcagaatcaatatcaatatgtgccacctcagcaacaagcacctacaaagcaacgtcctgctaaagaagagaatgatgataaagcatcaaaggatgagtcgaaagataaggatgacaaagcatctcaagataaatcagatgataatcagaagaaaactgatgataataaacaaccagctcagcctaaaccacagccgcaacaaccaacaccaaagccaaataataatcaacaaaacaatcaatcaaatcaacaagcgaaaccacaagcaccacaacaaaatagccaatcaacaacaaataaacaaaataatgctaatgataagtagtatttagtcaaacaaaaatgaaccagtatgacagacaacacaattaattaggttgtctcgaatattggttcttatttttataattgttaattaggggagagatgatacttaaatagttagttgtttattttgcagatagtgaaatttattttttcagtcaactactggcaatgtaacttttcagattctagagcattgatttatgtcctagtctcaaataataagcaaatgattagagaatcagtataagggtatacatttgactacagcgaataaaataaaacgttttgttgtataataaatcgaaaatatattgcaagcgctttatcaaattatttagaaaatttaagttttatgcttgcaatttttgaaatagaatagtactattgcaagtgtaaagaggttaatttttgtcccacgtgggacttaaaaaggcaaccactggttgtgacatatccttatttacatttataaatataaggaggaggtagtagtgaaagacttattgcaagcacagcaaaagcttataccggatctcatagataaaatgtataaacgtttttctattcttactactatctcaaaaaatcagcctgtcggacgtcgaagtttaagcgaacatatggatatgactgaacgtgtactgcgttctgaaacagatatgcttaagaaacaagatttgataaaagttaagcctaccggaatggaaattacagctgaaggtgagcaactgatttcgcaattgaaagattactttgatatctatgcagatgacaatcgtctgtcagaaggtattaagaataaatttcaaattaaggaagttcatgttgttcctggtgatgctgataatagccaatctgttaaaacagaattaggtaggcaagcaggtcaattacttgaaggcatattacaagaagatgcgatagttgctgtaactggcggatccacgatggcatgtgttagtgaagcaattcatttattaccatataatgtattcttcgtaccagccagaggtggactaggcgaaaatgttgtctttcaggcaaacacaattgcagccagtatggcacaacaagctggcggttattatacgacgatgtatgtacctgataatgtcagcgaaacaacatataacacattgttgttagagccatcagtcataaacactttagacaaaattaaacaagcaaacgttatattacacggcattggtgatgcgctgaagatggcgcatcgacgtcaatcacctgaaaaggtcattgaacaacttcaacatcatcaagctgtcggagaggcatttggttattattttgatacacaaggtcaaattgtccataaggttaaaacaattggacttcaattagaagaccttgaatcaaaagactttatttttgcagttgcaggaggcaaatcgaaaggtgaagcaattaaagcatacttgacgattgcacccaagaatacagtgttaatcactgatgaagccgcagcaaagataatacttgaataagagataaaaagtttaatactttttaaatatcattttaaaggaggccattataatggcagtaaaagtagcaattaatggttttggtagaattggtcgtttagcattcagaagaattcaagaagtagaaggtcttgaagttgtagcagtaaacgacttaacagatgacgacatgttagcgcatttattaaaatatgacactatgcaaggtcgtttcacaggtgaagtagaggtagttgatggtggtttccgcgtaaatggtaaagaagttaaatcattcagtgaaccagatgcaagcaaattaccttggaaagacttaaatatcgatgtagtattagaatgtactggtttctacactgataaagataaagcacaagctcatattgaagcaggcgctaaaaaagtattaatctcagcaccagctactggtgacttaaaaacaatcgtattcaacactaaccaccaagagttagatggttctgaaacagttgtttcaggtgcttcatgtactacaaactcattagcaccagttgctaaagttttaaacgatgactttggtttagttgaaggtttaatgactacaattcacgcttacacaggtgatcaaaatacacaagacgcacctcacagaaaaggtgacaaacgtcgtgctcgtgcagcagcagaaaacatcatccctaactcaacaggtgctgctaaagctatcggtaaagttattcctgaaatcgatggtaaattagatggtggtgcacaacgtgttcctgtagctacaggttcattaactgaattaacagtagtattagaaaaacaagacgtaacagttgaacaagttaacgaagctatgaaaaatgcttcaaacgaatcattcggttacactgaagacgaaatcgtttcttcagacgttgtaggtatgacttacggttcattattcgacgctacacaaactcgtgtaatgtcagttggtgaccgtcaattagttaaagttgcagcttggtatgataacgaaatgtcatatactgcacaattagttcgtacattagcatacttagctgaactttctaaataattttagtatagtttttattcaaatacgctagtgctcagaactatttagcattaattaaagcttatgagtaagcggggagcacaaacgcttctccgcttatttttatataaaatttcctaattacaaggaggaaacaccatggctaaaaaaattgtttctgatttagatcttaaaggtaaaacagtcctagtacgtgctgattttaacgtacctttaaaagacggtgaaattactaatgacaaccgtatcgttcaagctttacctacaattcaatacatcatcgaacaaggtggtaaaatcgtactattttcacatttaggtaaagtaaaagaagaaagtgataaagcaaaattaactttacgtccagttgctgaagacttatctaagaaattagataaagaagttgttttcgtaccagaaacacgcggcgaaaaacttgaagcagctattaaagaccttaaagaaggcgacgtattattagttgaaaatacacgttatgaagatttagacggtaaaaaagaatctaaaaatgatccagaattaggtaaatactgggcatctttaggtgatgtgtttgtaaatgatgcttttggtactgcgcatcgtgagcatgcatctaatgttggtatttctacacacttagaaactgcagctggattcttaatggataaagaaattaagtttatcggtggcgtagttaacgatccacataaaccagttgttgctattttaggtggagcaaaagtatctgacaaaattaatgtcatcaaaaacttagttaacatcgctgataaaattatcatcggcggaggtatggcttatactttcttaaaagcgcaaggtaaagaaattggtatttcattattagaagaagataaaatcgacttcgcaaaagatttattagaaaaacatggtgataaaattgtattaccagtagacactaaagttgctaaagaattttctaatgatgccaaaattactgtagtaccatctgattcaattccagcagaccaagaaggtatggatattggaccaaacactgtaaaattatttgcagatgaattagaaggtgcgcacactgttgtatggaatggacctatgggtgtattcgagttcagtaactttgcacaaggtacaattggtgtatgtaaagcaattgcaaaccttaaagatgcaattacgattatcggtggcggtgattcagctgcagcagcaatctctttaggttttgaaaatgacttcactcatatttcaactggtggcggagcgtcattagagtacctagaaggtaaagaattgcctggtatcaaagcaatcaataataaataataaagtgatagtttaaagtgatgtggcatgtttgtttaacattgttacgggaaaacagtcataagatgacatcgtgtttcatcacttttcaaaaatatttacaaaacaaggagtgtctttaatgagaacaccaattatagctggtaactggaaaatgaacaaaacagtacaagaagcaaaagacttcgtcaatgcattgccaacattaccagattcaaaagaagtagaatcagtaatttgtgcaccagcaattcaattagatgcattaactactgcagttaaagaaggaaaagcacaaggtttagaaatcggtgctcaaaatacgtatttcgaagataacggtgcgttcacaggtgaaacgtctccagttgcattagcagatttaggcgttaaatacgttgttatcggtcattctgaacgtcgtgaattattccacgaaacagatgaagaaattaacaaaaaagcgcacgctattttcaaacatggaatgactccaattatttgtgttggtgaaacagacgaagagcgtgaaagtggtaaagctaacgatgttgtaggtgagcaagttaagaaagctgttgcaggtttatctgaagatcaacttaaatcagttgtaattgcttatgaaccaatctgggcaatcggaactggtaaatcatcaacatctgaagatgcgaatgaaatgtgtgcatttgtacgtcaaactattgctgacttatcaagcaaagaagtatcagaagcaactcgtattcaatatggtggtagtgttaaacctaacaacattaaagaatacatggcacaaactgatattgatggggcattagtaggtggcgcatcacttaaagttgaagatttcgtacaattgttagaaggtgcaaaataatcatggctaagaaaccaactgcgttaattattttagatggttttgcgaaccgcgaaagcgaacatggtaatgcggtaaaattagcaaacaagcctaattttgatcgttattacaacaaatatccaacgactcaaatcgaagcgagtggcttagatgttggactacctgaaggacaaatgggtaactcagaagttggtcatatgaatatcggtgcaggacgtatcgtttatcaaagtttaactcgaatcaataaatcaattgaagacggtgatttctttgaaaatgatgttttaaataatgcaattgcacacgtgaattcacatgattcagcgttacacatctttggtttattgtctgacggtggtgtacacagtcattacaaacatttatttgctttgttagaacttgctaaaaaacaaggtgttgaaaaagtttacgtacacgcatttttagatggtcgtgacgtagatcaaaaatccgctttgaaatacatcgaagagactgaagctaaattcaatgaattaggtattggtcaatttgcatctgtgtctggccgttattatgcaatggaccgtgacaaacgttgggaacgtgaagaaaaagcttacaatgctattcgtaactttgatgccccaacttatgcaactgccaaagaaggtgtggaagcaagttataatgaaggcttaactgacgaattcgtagtaccattcatcgttgaggatcaaaatgacggtgttaatgatggagatgcagtgatcttctataatttccgacctgatagagcggcacaattatcggaaatttttgcgaacagagcattcgaaggatttaaagttgaacaagttaaagacttattctatgcaacattcactaagtataatgacaatatcgatgcggctatcgtcttcgaaaaagtcgatttaaataatacaatcggtgaaattgcacaaaataacaatttaactcaattacgtattgcagaaactgaaaaatatcctcacgttacttactttatgagtggtggacgtaatgaggaatttaaaggtgaacgtcgtcgtttgattgattcacctaaagttgcaacgtatgacttgaaaccagaaatgagtgcttatgaagttaaagatgcattattagaagagttaaataaaggtgacttggacttaattattttaaactttgctaaccctgatatggttggacatagtggtatgcttgagccgacaatcaaagcaatcgaatcggttgatgaatgtttaggcgaagtggttgataagattttagacatggacggttatgcaattattactgctgaccatggtaactctgatcaagtattgacggatgatgatcaaccaatgacgacgcatacaacgaacccagtaccagtgattgtaacaaaagaaggcgttacacttagagaaactggtcgtttaggtgacttagcacctacattattagatttattaaatgtagaacaacctgaagatatgacaggtgaatctttaattaaacactaatattgtaaaagatgttaagtaaacgcttaatgacacttattttttgaaaataatagtaatatcattttgttaaatgaaagaataaagctataataattatagaataactatttaaaggagattataaacatgccaattattacagatgtttacgctcgcgaagtcttagactctcgtggtaacccaactgttgaagtagaagtattaactgaaagtggcgcatttggtcgtgcattagtaccatcaggtgcttcaactggtgaacacgaagctgttgaattacgtgatggagataaatcacgttatttaggtaaaggtgttactaaagcagttgaaaacgttaatgaaatcatcgcaccagaaattattgaaggtgaattttcagtattagatcaagtatctattgataaaatgatgatcgcattagacggtactccaaacaaaggtaaattaggtgcaaatgctattttaggtgtatctattgcagtagcacgtgcagcagctgacttattaggtcaaccactttacaaatatttaggtggatttaatggtaagcagttaccagtaccaatgatgaacatcgttaatggtggttctcactcagatgctccaattgcattccaagaattcatgattttacctgtaggtgctacaacgttcaaagaatcattacgttggggtactgaaattttccacaacttaaaatcaattttaagcaaacgtggtttagaaactgcagtaggtgacgaaggtggtttcgctcctaaatttgaaggtactgaagatgctgttgaaacaattatccaagcaatcgaagcagctggttacaaaccaggtgaagaagtattcttaggatttgactgtgcatcatcagaattctatgaaaatggtgtatatgactacagtaagttcgaaggcgaacacggtgcaaaacgtacagctgcagaacaagttgactacttagaacaattagtagacaaatatcctatcattacaattgaagacggtatggacgaaaacgactgggatggttggaaacaacttacagaacgtatcggtgaccgtgtacaattagtaggtgacgatttattcgtaacaaacactgaaattttagcaaaaggtattgaaaacggaattggtaactcaatcttaattaaagttaaccaaatcggtacattaactgaaacatttgatgcaatcgaaatggctcaaaaagctggttacacagcagtagtttctcaccgttcaggtgaaacagaagatacaacaattgctgatatcgctgttgctacaaacgctggtcaaattaaaactggttcattatcacgtactgaccgtattgctaaatacaatcaattattacgtatcgaagatgaattatttgaaactgctaaatatgacggtatcaaatcattctataacttagataaataatcattttaaacattaagtactgccataattttagttgaggattattatgtcggtataaattgaataaagtttttgagttcacgcttaaaaagttcacgcttttatttataacctgccacagagttgagactgtggcaggtttttttttgaagtattattcataacagactaataatcatgaggtaactaataacacatatttaacttgtattattaaactggtataataaatttatgttgaaatgaatattgtatgacagggtattcacttttattaaaaggtaaaattaaataaaggttttatagaacgtatttaaatatatgaggagtaaacaaatggttgatagaacgaataaagaaattaaaacaggacgctttattgcaactgcatcaatcgcattctcaatattgttgattattcattactttgtttcgttggataatgcgactgccaaagcattactcaatttaacgaatcaaaacacttcagataaagcgatagattacattttaaacagctttagattcactggtattatgtatattttggcttatctagcaggcttcatcactttttggaatcgacatacttatgtgtggtggtttatgtttgcagtttatgtatcaaatagtttgtttacgttgattaatttatcaatcacaattcaagcaataaaagctgcacacggtgcgtacttaacattgccaattttaattgttattataggttcggttgcattagcgatttatatgcttgttgtttctatcaaacgtaaaagtacatttaatcgctagaaaattgattttaacaatgaaaatatgatatactacttgtcgtatataaggaacggaggacaatttatgcatacatttttaatcgtattattaatcattgattgtattgcattaataactgttgtactactccaagaaggtaaaagcagtggactttcaggtgccatcagtggtggtgctgagcagttattcggtaaacaaaaacaacgtggcgtcgatttattcttaaatagattaacaattattttatcaatattattttttgtacttatgatttgcataagttatcttggtatgtaaggtccggcgatgtaaatgtcgggcttttttatttataattagaataataaaggactcatgttcaattattagaaacatattgtttaattaagtacgtttgttaattgtgaaaaaggagcgttagatttatgcaaataaagttaccaaagcctttcttttttgaggaaggtaaacgtgccgtgttattactacatggttttacaggcaattcgtctgatgttcgtcaattaggtcgatttttacaaaagaaaggttatacatcgtatgcaccacaatatgaaggtcatgcagcaccaccagaagagatacttcaatcaagtccttttgtttggtttaaagatgccttagatggctatgactaccttgttgaacaaggttatgatgaaatcgttgttgctggcttgtcattaggtggcgattttgcattaaaattaagcttaaatcgagatgtaaagggtattgtaacgatgtgtgctcctatgggtggcaaaactgaaggtgccatttatgaaggctttttagaatatgcacgcaattttaaaaagtatgagggtaaagatcaagaaacgattgacaaagaaatgcatcatttcaaaccaactgaaactttaaaagaattaagtgaagcattagatacgattaaagatcaagttgatgaggtgcttgacccaattttagtgattcaagcagaaaacgacaatatgattgatccacaatccgcaaattatatatatgaacatgtagactctgacgaaaaagatatcaaatggtatagtcagtcaggacatgttattacaattgataaagaaaaagaacaagttttcgatgatatttatcaatttttagagtcattagactggtcagaataaaaagagattttaacattagaaaggaggggcataatgaatttaaagcaatcaatagaagagattattaatcaacctgaatatgaacctatgtcagtttcagattttcaagatgcattaggtttaagcagtgccgactcgtttagagatttaattaaggtgcttgtggagttagaacaatcaggattaatcgaacgttcgaaaacagatagataccaaaaaaagcatagttccaaaggtcaatcgaaattgataaaaggaacgttaagtcaaaacaagaaaggttttgctttcctaagacctaaagatgaggatatggaagatatatttattcccccaacaaaaattaatcgtgccttagacggagatactgtaattgtagaaatacatcaatctaaaggtgaacataaaggtaaaattgaaggggaagttaagtcgattgagaagcattctgtaactcaagttgttggtacgtatagtgaagctagacatttcggctttgttattccagatgataaacgtattatgcaagatattttcattcctaaaggtcaaagtttaggtgcagtagatgggcataaggtactagttcaaattactaagtatgctgatggttcagataatcctgaagggcatatttcagcaatattaggacataaaaatgatccaggtgtagatattttatctattatttatcaacatggtattgaaattgagtttcctgatgaagtattagaagaagctgaagcagtacctgatcatattgaaaatactgaaattaaaggccgtcatgatttacgtgatgaattgacaatcacaattgatggtgcggatgctaaagacttagatgacgcaatcagtgttaaaaagttagcgaacggtcatacgcaattaactgtaagtattgctgatgtcagttattatgtaacggaagattcagctttagataaagaagcttatgatagagcgacaagtgtatatcttgttgaccgtgtgattccgatgattccacatcgattaagcaatggtatttgttcattaaatcctcacgttgatcgtttaacgttaagctgtcgcatggaaattgatgcaagtggtcgtgttgttaaacatgaaatttttgatagtgttatacattctgattatcgaatgacgtatgatgcagttaaccagattattactgaaaaggatcctaacattcgcgagcaatataaagaaattacgcctatgttagatttagcacaagatttatctaatcgtttgattcaaatgagaaaacgtcgtggtgaaattgattttgatattagcgaagcgaaagtactagttaacgaagatggtatacctacagatgttcaattgagacaacgtggtgaaggcgaacgtcttattgagtcatttatgttaattgcaaatgaaacagttgctgaacattttagtaagttagatgtaccatttatttaccgagtgcatgagcaacctaaatcagatcgcttaagacaattctttgattttattactaactttggcattatgattaaaggaacaggcgaagatattcatccaacaacacttcaaaaggtccaagaagaagtagaaggtcgacctgaacaaatggtcatttcaacaatgatgttacgttcaatgcaacaagcgcattatgatgatgtgaacttgggacattttggcttatcagctgaatattatacgcattttacatcaccaataagacgttatcctgatttaacagttcatcgtttaatccgtaagtatttaattgagaaatcaatggataacaaagaagtgaagcgttgggaagacaaattgcctgagttagctgaacatacttctaaacgtgaacgtcgtgctattgagtcagaacgtgatactgatgaattgaaaaaagcagaatatatgattcaacatattggtgatgaatttgaaggtattgtcagctcagtagctaacttcggtatgttcattgaattgccaaatacgatagaaggtatggttcatattgcgaatatgactgatgattattaccgttttgaagagcgtcaaatggcattaattggtgagcgtcaagctaaagtatttagaattggtgacacagttaaggttaaagtgacgcatgttgatgtagatgaacgattaattgattttcaaattgtaggtatgcctttaccgaaaaatgatcgatcacagcgcccagcacgaggtaagacaattcaagctaaaacgcgtggtaaatcattagataaatcgaaatctgatgataaaggtcataagaaaaaaggtaagcaacgtaaaggtaaaaaccaacgtaaaaatgacaaatcaggaaacagtaaacataagccattttataaagataaaagtgtgaaaaagaaagcacgtcgtaagaaaaaataagcagcaatgaggtgagtatgaatggctaagaagaaatcaccaggtacattagcggaaaatcgtaaagctagacatgattataatattgaagacacgattgaagcgggaattgtattgcaaggcacagaaataaaatcaattcgccgaggtagtgctaaccttaaagatagttatgcgcaagttaaaaacggtgaaatgtatttgaataatatgcatatagcaccatacgaagaagggaatcgttttaatcacgatcctcttcgttctcgaaaattattattgcataagcgtgaaatcattaaattgggtgatcaaacacgtgagattggttattcgattgtgccgttaaagctttatttgaagcatggacattgtaaagtattacttggtgttgcacgaggtaagaaaaaatatgataaacgtcaagctttgaaagaaaaagcagtcaaacgagatgttgcgcgcgatatgaaagcccgttattaagcgatttagttgcttaatcgggctatatttgatatagttatatgtgcttttgtaaattgcaaaagtatgatttgtttgatttattatttcggggacgtttctggattcgacaggggtcccccgagctcattaagcgtgtcggagggttgtcttcgtcatcaacacacacagtttataataactggcaaatcaaacaataatttcgcagtagctgcctaatcgcactctgcatcgcctaacagcatttcctatgtgctgttaacgcgattcaaccttaataggatatgctaaacactgccgtttgaagtctgtttagaagaaacttaatcaagctagcatcatgttggttgtttatcacttttcatgatgcgaaacttttcgataaactacacacgtagaaagatgtgtatcaggacctctggacgcgggttcaaatcccgccgtctccatatttgtagcctacaacctttgcggatgtgggcttttttatttgttttttatctcttcttgtgaggaaggttaaattagctgtgaacgttgatatgatagtatctgattaggttcaaattttcatgaatgaaaaattaatacttgtgtacatataagattttgcgttaagggttgaaagaatatgtgtcaaataagtgtcaaaaaagttgagctttgagttttaaaatgtaaattttatttgcaaaattaattaagctaaagaagtatcataaataagagaattaaatatatagtttagaattagaatcaagatttttataaatattatatttttcttttaattgacttaaatttgatatattgtttaaatgtaatgaggaaaagttgtgatagttttagctggtaaattaaaggttttaatatagctggtttttaatagatttttaaggatgatatcgtttgcgagtgaacgtatctatttagtgaaatagtatttatagatgggggcataatcaatgaatgacttgagtttatcttcatttttgaaacgcagtaacaaatttatgcaattcaattgttttatttgtttgattctaataatagtattttacataattggtatgaatatacaggactttagtgattttcctagtaaagatttaaatcataaagtgacttataatcttaatgggtttttggagatatttgttaataatgcttttatagttccttttgtgtcacttatattatcgataataccaataccatatttgtattttattcctacaatatctacaatttattcattgtcggttattattggggttacattttcatataaattaaacgaagggatagctatttttattggtattttgcctcatggtattttagaaatatacttaacaagcattgaactatcaatgttattcttattaaatgcgtacatcagaaaaaattcaatgaatttatttagaaaaagaaaagagacattgccaaatttttttgttttattaaaatcaatagtaaagtgttacctgctaatatttttacctgtggcatttttatgcgctttaattgaaattactgttacaccaactgtttacaaatttttaactaatataatatagaacttttaaaagggcatagctaactatgtgtataggtttatttttgatcgataaatattgatttgtaaaatatgagttcacgaaaaatgttgcatggtattcgtgaaactataatcgagtcatttcaaaaatgaccatttcaaaacaacaaaaaagagtaggcgagctactcttttttgttatatttaacaattaaattagtgtgtcattatgagtgtaagtaagctaatttataatgacaataataacaacaaagattataacgctgaatgcgagcattcataaatttatacttcatctaaaccactgtggtcgtcatctttttgcttttctttttctttctctcgttcttgttcttttttgtactcttcttcaaattctttttctttcttttctacttcttcccttgtttccgctctatgagaaaaatcttcggttttaagtttactaaatttgaatgatttagaatcaactgttttatcttctgagtatttatggacatttaaattaatgtttccatcacctcttaactcatagataaacatggcttgtgcagttttgccttttttaatttgatcttggttatgttctgtccaatctttataatttttatcacttaaaagataaccatctcttaatttatttactgtatttttatcatcttgagtgatattaatatagtcatgagaaatagaagatggatttaaatctttatcgtcttttttagcagtaatttccattttaaaagcgatatatttctttttctcatctttttcattgatgataaacggttcttttattttagcttcaaatttgtcactaacaatagtatcgcctttaatttttatatccatattttttttgcttttaaattctttaagttcttcatttaattcttcattgtcattttctttctttttgtgactagtgctctctttttttgcactatcttgatgatgtccacaagcacctaagataagtgtacttgctaataatatccccattacttttttcatttaacatgtctcctttatttcgcaaaaatttattttaaaaactctaaacgacttatcgttttgagtaattaaacaaagttgatattttgtgagattctaagatgatattaaataattcttgtaataatgattctatgtattgttgcaataaattaatggaactataattactaatattatattacttttattgatagaaatatattacttttttaaaaaacttgtaatatatcgaaagatttaaatgtaaaattttgatttgttaagaaattacgtttataaaaaaaaaaaattcaacttatttgtatgagatgaatatgtattgaagaagatgttttattaattttgaaatactggtcaaagatgggtgccctcaaaagcgttattgtattttttagtcaatgcaaatagattgccgtaataataagcgtacttgatagttaaaaaattacttaaggctataaagcaaaattttttatatgagcagtcgaatataacgtttaaaatgattctttttggatataaacgattaagtaaaatgatttttcagtttgaaattaatcatatgaatttcttaagagaagggtgatatcttaatgattaatattatttcagctataggatctattggaacatttattatggctttattttattttgtatcagtttcagttcaactttatcaaatgaaaattagctttctgccagctttaggttttaaccaaattttattagaaagggagggggatcaacttaatataatgaattccgctacagaagagcatcatcataaagattatattaaactatataatttaggtggcggtgctgctaaaaaaattgcaatagaggttttattgggtaatgataaagtcattcagaaaaagtacgtgaatattttacctagtaaagaagggtacatgttatcaattaataaaaatgtgtacgaagaattagaaagaacgattgagaacaatggttatgaagctgatttgaatgtacgtatgacttattatcataatgtaagtcacaaacaacaggaagttatattaaaaggtcaaatcgaccgttttaatacttataataataaagaaatttatgatttgcagtttatctgaaaattgatttaagaggatagttgtttattgcaaaaaatatcattcaattttaatgaaataatggcgtcattactataaaatattactttatgttgtaatgcatttttctataagatagaactaaaaggaggggcaaagatgcaaattagacaaatacatcaacatgactttgctcaagttgaccagttaattagaacggcatttgaaaatagtgaacatggttatggtaatgaatcagaactagtagaccaaattcgtctaagtgatacgtatgacaataacttagaattagtagctgttcttcaaaatgaagttgtagggcacggtttactaagtgaagtttatcttgataacgaggcacaacgggaaattggattagtgttagcacctgtatctgttgatattcatcatcaaaataaaggtattgggaagcgattgattcaagcattagaacgagaagcaatattaaaaggatataattttatcagtgtattaggatggccgaattattatgccaatctaggatatcaacgcgcaagtatgtacgacatttatccaccatatgatggtataccagatgaagcgtttttaattaaagaattaaaagtgaacagtttagcgggaaaaacaggtaccataaattacacatctgcttttgaaaaaatatgatttcaagctaggattacattaggcagagttcatattaataatacaaattgtttacaatgaaatcgcgcattgtcgtttgcaatttttaaaacagagaaaatgaaaaacttttcgttgtaaatatttattgtagttaataaaattctaaaacaaattaattgccattatgcaattttggtgtataattgcattaatagagattaaatatatattaaaagggtatacagttaatataaaatgactttttaaaaagagggaataaaatgaatatgaagaaacaagaaaaacacgcaattcgtaaaaaatcgattggcgtggcttcagtgcttgtaggtacgttaatcggttttggactactcagcagtaaagaagcagatgcaagtgaaaatagtatgacacaaacggaaaatacgagtaatgagagcaaaagtaatgatccaagtagcgttaatgctgcacctaaaacagacaacacaaacgtgagtgattctaatacaacgacaaacactaatagtgacgaaacgaatgtagcgcaaaatccagcacaacaggaaacgacacaatcagcatcaacaaatgcaactacagaagaaacaccggtaactggtgaagttactactacggcaacgaatcaagctaatacaccggcaacaactcaatcaagcaatacaaatgcggaagaatcagtgaatcaaacaagtaatgaaacgacttctaatgatactaatacagtatcatctgtaaattcacctcaaaattctacaaatgcggaaaatgtttcaacaacgcaagacatttcaactgaagcaacaccttcaaacaatgaatcagctccacagagtacagatgcaagtaataaagatgtagttaatcaagcggttaatacaagtgcgcctagaatgagagcatttagtttagcggctgtagctgcagatgcaccggctgctggcaaagatattacgaatcagttgacgaatgtgacagttggtattgactctggagatacagtttatccgcaccaagcaggctatgtcaaactgaattatgggttctcagtaccaaatgaggctgttcaaggtgacacattcaaaataactgtgcccaaagaattaaacttaaatggtgtaacttcaactgctaaagtgccaccaattatggccggagatcaagtattggcaaatggtgtaatcgatagtgatggtaatgttatttatacatttacagactatgtaaatactaaagatgatgttaaagcaactttgaccatgcccgcttatattgaccctgaaaatgttacaaagacaggtaatgtgacattggctactggcataggtagtacaacagcaaacaaaacagtattagtagattatgaaaaatatggtaagttttataacttatctattaaaggtacaattgaccaaatcgataaaacaaataatacgtatcgtcagacaatttatgtcaatccaagtggagataacgttattgcgccggttttaacaggtaatttaaaaccaaatacggatagtaatgcattaatagatgcacaaaatactagtattaaagtatataaagttgataatgcatcagacttgtctgaaagttattatgtgaatccagataactttgaagatgtcactgatagtgtgaatattacattcccaaatccaaatcaatataaagtagagttcaatacgcctgatgatcaaataacaacaccatatattgtagttgttaatgggcatattgatcctaatagtaaaggtgatttagctttacgttcaactttatatggatataattcgaatataatttggcgatcaatgtcatgggataatgaagtagcatttaataacggatcaggttctggtgacggtatcgataaacctgttgttcctgaacaacctgatgagccgggtgaaattgaaccaattccagaggattcagattctgacccaggttcagatagtggttcagattctggcagcgattctaattcagatagcggttcagattcgggtagtgattctacatcagatagtggttcagattcagcgagcgattcagattcagcaagtgattcagattcagcgagtgattcagattcagcaagtgattcagattcagcgagtgattcagattcaacgagtgattcagattcaacgagtgattccgattcagcaagcgattcagattcagatagtgactcagactcagacagcgattcagattcagatagtgactcagactcagatagcgattcagattccgacagtgactcggattcagatagcgattccgactcagacagtgactcagattcagatagcgactcagactcagaaagcgactcagattcagacagcgattccgactcagatagtgattcagattcagacagcgactcagacagtgtttcagattcagacagtgactcagactcggatagtgaatcagactcagacagcgactcagattcagacagcgactcagactcggatagtgaatcagactcagacagtgactcagactcagacagcgactcagactcagatagcgactcagattcagatagcgattcagactcagacagcgactcagactcagatagcgattccgactcggatagcgattcagaatcagatagtgactcagattcagatagcgattccgactcagatagcgactcagattccgacagcgattcagattcagacagtgatttagactcagacagtgactcggattcagatagcgattccgactcagacagtgactcggattccgacagcgattcagattcagacagtgatttagactcagacagtgactcggattcagatagcgattccgactcagatagtgcctcagattcagatagcgactcagactcagacagcgattcagaatcagatagtgactcagattcagatagcgattccgactcagacagtgcctcagattcagatagtgactcggattcagcgagtgattccgattcagattcaacgagtgacacaggatcagataacgactcagactcagaaagtgattcgaatagcgattccgattcaggttctaacaataatgtagtgccgcctaattcacctaaaagtggtactaatgcttcaaataaaaatgaggctaaagaaagtaaagaaccattaccagatacaggttctgaagatgaagctaatacgtcactaatttggggattattagcatcattaggttcattactacttttcagaagaaaaaaagaaaataaagataagaaataagtaataatgatattaaattaatcgtatgattcatgaagaagtcacctaaaaaggtggcttttttacttggattttccaaatatattgtttgaatataattaataattaattcatcaacagttaattattttaaaaaggtagatgttatataatttggcttggcgaaaaaatagggtgtaaggtaggttgttaattagggaaaattaaggagaaaatacagttgaaaaataaattgctagttttatcattgggagcattatgtgtatcacaaatttgggaaagcaatcgtgcgagtgcagtggtttctggggaggagaatccatataaatctgagtcattgaaattaaatgggaaaagaagtactacaataactagtgataaatatgaagaaaatttagatatgttaatatcgtcattatcatttgcagattatgaaaaatatgaggaaccagaatacaaagaagcagttaaaaagtatcaacaaaaatttatggctgaagatgatgcattaaaaaaattttttagtgaagagaaaaaaataaaaaatagaaatactaatacatcaaattatctgggattaacacacgaaagatatgagtcaatttataattcattaaaaaatcatcgtgaagaattttcaaaagaaatcgaagaaattaataataaaaatccagtgttaaaagaatataacaatgaggaacaaactaaagctgatacggaattaaacactcttgaaaatcaagtactaatgataggttatacattttatcactcgaataaaaatgaagtagaagatttatataacaaattagatatgattcttggttataaagatgaagagagaaaaaagaagagggctaccaatcaaagaatgttcaataataaaaaagaggatttagaaactattattgatgaattctttggagaaattggacaacaaaggccaacatctataccaacattagcgcctaaagaagaaaaagaaacaaatataaaaaatgcaaataaattaaaatctgacactgaagcagcaaaaaatgatgaagcaaaaagaagtttaaatacccacaatcacaaatctgtatctcaagaagtctctgaacaacaaaaagctgactacgaaagaaaagctgaagaaagaaaagcgagatttttagataagcaaaaaaataagaaaactcctgtagtttcattagaatatgattttgaacataaacaacgtgttgacaacgaaaacgacaagcaacttgtggtttctgagccatcaaagaaaccaacaacaccgcctacatacactgaaacaaccacacagctaccaatgcctacagttgagcgtcaaacacagcaacaaatcgtttacaaagcaccaaaaccattagctggattaaatggtgaaagtcatgatttcacaacaacgcatcaatcaccaactacttcaaatcacacgcataatcatcttattgaaattgaagaaacatctgctttacctggtagaaagacaggttcattggttggtttgagtcaaattgattcttcgcatttaactgaacgtgagaagcgcgtgattaaacgtgaacacgtgagagaagctcaaaagttagttgataattataaagatacacatagttataaagaccgattaaatgcccaacaaaaagtaaatactttaagtgcaggtcatcaaaaacgttttaataaacaaattaataaagtatataatggcaaataattaatgcatggctgcaaaggaaataatgagtttgccgtaaaaataacaacattttaaactagcaataaataatatcaaagtcatcatttcaatgatgcaatctagtatagtccacattctaaacaggtgtggactattacttttttcactttatattacgaaaaaattattatgcttaactatcaatatcaataattaattttaagctgaaaaacaataaaaatgttaagacaacgtttacttcaagttaattattatactgaaaattctggtatataatgctgttagtgaatataacaggaaaattaaattggttatgatattgagtctatataaaggagaaataacagatgaaaaagaaattattagttttaactatgagcacgctatttgctacacaatttatgaattcaaatcacgctaatgcatcaacagaaagtgttgataaaaactttgtagttccagaatcgggtattaataaaattattccaacttacgatgaatttaaaaaagcaccaaaagtaaatgttagtaatttagctgacaacaaaaactttgtagcttctgaagataaattgaataagattgcagatccatcggcagctagtaaaattgtagataaaaactttgccgtaccagaatcaaaattaggaatcattgtaccagagtataaagaaatcaataatcgagtgaatgtaacaacaaacaatccagcttcaaaacaagttgacaagcaaattgttgctaaagacccagaggtgaatagatttattacgcaaaataaagtaaaccatcgtttcattactacgcaaacccactataagaaagttattacttcatacaaatcaacacatgtacataaacatgtaaaccatgcaacatcttctatccatcatcactttactattaaaccatcagaagcacctagatatacacacccatctcaatctcaatcgttaattataaatcatcattttgcagttcctggataccatggtcataaagttgtaacaccaggacaagctagtattagaattcatcacttttgtgctgtacctcaaataaatagttttaaggtcattccatcatatggtcacaattcacatcgtatgcatgtaccaagtttccaaaataacacaacagcaacacatcaaaatgcaaaagtaaataaaacttataactataaatatttttatacttataaagtagtcaaaggtgtaaaaaaacatttctcattttcaaaatcacatggttgtaaaattgttaaaccagcattaaacatcaaaaatgtaaattatcaatatgctgttccaagtaatagccctacacacgttgttcctgagtttcagggtatcttaccagcaccacgagtataaaaattgacattaagtttacgagatatgataaatacctattattttaaacatagtctgcaatctatgaggttgtaggctatgttttttgcagtttatcaataaacacccatcaacaaattataccgtttttctactttaaaagttggaagtaacataatcttaaataaatatattattaattaagataaatataagactcgagattattgttaatagtttgttcatcgcaagttaattattgtttctaaaatattggtatataattttcaatggcgaagaaaacagggtaaaaaagtcggtttttaaatcaaagcaaataaggagtaaaaaatgaaaaggaaagtactagtattaacaatgggcgtactttgtgcgacacaattatggcaaacgaataatgcaaaagctttagtgacagagagtggcgttaatgatactaagcaatttactgaagtaacatcggaagaaaaagttataaaagatgctatttcgaaagtcaatgaaagctttatttactatccccaaaatgatttgaagggattaggtggagaacacaacgattacgaaaaaattacatatagcacttcttctaataatgttttagaattatcaatgagttcaaaatacgtaggcggtaaatcaggagctatggttggttatagtgaaatttactcatcacatttcacagaccgcgacaaacgtgctatcagacgtgatcatgttaaagaagcacaaaacttgattaatgattataaatatacgcaaatatatgaagactttgctaaagctactgcaaaggtaagtacacttagtcagtctcaccaaaattatttaaataaacaaattgataaagtgaataataagatagagaaaactgaaaaacgctaatacaaagtaatttataagttatacatttcgtttttaaatgacaatttatccccgtaaatataataaataatcttttcaaattccgcatagatatagagacgctaataaacctctttgtctcgatatgatagtctgcaacgattcatgttgtaggctttttaattttacaaatacgactaaatatataagttctgacacctaaaatatagaaaatacataaaagtaagtatagttattttattataattattaaatttttattaattaattgtaaaaatgtagaattataattaattaacgtttaatattaaaattaactaaaaagaaagaggtgttagttatgacagaatacttattaagtgctggcatatgtatggcaattgtttcaatattacttatagggatggctatcagtaatgtttcgaaagaacaatacgcaaagaggtttttctttttcgctactagttgcttagtgttaactttagttgtagcttcaagtctaagtagctcagcaaatgcatcacaaacagataatggcgtaaatagaagtggttctgaagatccaacagtatatagtgcaacttcaactaaaaaattacataaagaacctgcgacattaattaaagcgattgatggtgatactgttaaattaatgtacaaaggtcaaccaatgacattcagactattattggttgatacacctgaaacaaagcatcctaaaaaaggtgtagagaaatatggtcctgaagcaagtgcatttacgaaaaagatggtagaaaatgcaaagaaaattgaagtcgagtttgacaaaggtcaaagaactgataaatatggacgtggcttagcgtatatttatgctgatggaaaaatggtaaacgaagctttagttcgtcaaggcttggctaaagttgcttatgtttataaacctaacaatacacatgaacaacttttaagaaaaagtgaagcacaagcgaaaaaagagaaattaaatatttggagcgaagacaacgctgattcaggtcaataatgctcattgtaaaagtgtcactgctgctagtggcacttttataatttttagatcacgttatgatttattatcaaatcagaattaaaaaagtaaatcgtatcaaaatcaagtgtatttaatattagaaaataaaaattttaaatttagtattaaaatggaatattactatatatttcaatgtgtattatcacagaaaataaaataatgctttacttctatatttaaaagtgtataatgaaggttaagtaataaagagcgtgaagaaaaatgtgagttatttatatagaatattctccttttcatttatgaatttgttacaaaatatttagtgcaaaagcacgacggaggtattcaatatgaataacggtacagttaaatggtttaatgcagaaaaaggttttggtttcatcgaaagagaagatggtagcgacgtattcgtacacttctcagcaatcgctgaagatggatacaaatcattagaagaaggccaaaaagttgaattcgacatcgttgaaggcgaccgtggcgagcaagctgcaaacgtagttaaaatgtaattttaacttattcaaacagtccttattatagggctgtttttttatgctttaaatcgatagcagttggtgtggtaaaagcactagctgttatttttttgtccaataaatttaggtggagatctaacaatatataatggttctaaaataaatcgaactgatggaaaagttttttacttttcatctgtccgacttttgattttgaatataaaaaaagcgccaatacagaactttaataatgacgagaattaaagtctgtatatggcgataacaagaagtaatgttaaacactcaaaatgtttaacaataataggataccacatcgcataatatcttactacttaattaataatttaactaatcaactttttgttaattttttattaagactgattaattattgagaatatttattgtttttaaaatctcataataattcagtaatcttgttttcatttaaaaggcgaaacattaaaataattaaataaaaatattgtgtttaatttacagcgtcaaatatacttatttctaatgctttggggtctactgaaacaagtagagaatgatcgatgttactaacattgccattatccaaatctatttctgtgagtatttggaagctaccattaggcaacggtttaacaatagacaattgcttttccgcttgttgtattaaaaaaggttttgtagattgattattaatatgccattcactcatgtatgtttttcactcctgctttaaattagggttagaaagtttatagttgagacattcatgttcaaccaaaattttgttcaaattcaataaatgtcttgtttaaaatagaaatattgtaaatgttatcgtccaaaacttcaccagttaagtatttgttttgaattaaaatttggcagttagttaagaagtcttgataatcacgatcgcaaaaatagttttcacgtgcatctttagcatcgccaaaaaagttagcgactgtttctgtttctccattattcgaacgttcaatatataatttgtaaaatttagctattgtatacttttgttctttagttagttcattcaaaatattgggcctcctgaaatatcatttgtaatctatacccaatttattgcaaaacacaaactaatttaactatttgatgaaactgtgttaataagctttaacaagtcttagtttatatggatctataaaattatctttaattgcatagggtgaaataatatgtagtccataacttttaactgatttttcacttacaccaaatttataagcttgatagataattttagtacaatacgtaaattttttgctgttcaaatttaatgtaactagataacgatgatttgtattttcatagtttttcttaacccagtcagccgcttttttacctgcaccaggatagctgcaacgataaactttcatccaatcatttttgccacttgcataattatatttaaaagattcgaaggattgtgtagttggtttgtcgccaggcccctcaatttgcaaaatcgttttatcatcaatcgcgatactacaatgaccaaaaaatccccacatgacagggccttttgtaataataatatcaccaggttgtaattggaatttgtcatcttgaatttctgaatacttattatctgcaattgtttttggtgagtttataggggatacgacaacgaataatataagtaaaattaacgttcgtttaatatagttcacttaaaagctccttgttgaagaaatatatgtaaatagccttgaattataattttaatctttaataagcatgcaagactaaaacatatcttaaatattaaagtatgagagtgtgaaatgtctattaagaataaaaaacagtctaaaacatctttgagacgtttcagactggatataaaatgaatttcatttatagcacaccaaatataaatgtgtatattaaaatagcgaatccgaaaatatagagaatgacagtgaaacttaaataggactcttttttagattctttgccagtttttttcattaatacgagtataaacgtagcggcaactaagaaaattaatgctagccaaaacagaattgcaaaatgtaaagacatgtgaaaccctccttatataccgtaattattaacctataaaactataaaaaataggataaatgtaatagagaacgagtacgatatttataaaaaataatatttcacttaaccagtttttagttatcattgcaatggtaaaggatactatgagtatcacaccacaaatgataataccaggcaggagccaacataaatcatctaaatctttattatatgtgattaaaatattaaagataacaaaagtggtagtaataactatattgatagcatttaacaaaatgttattcatgactgacacctactagtataaaaatagcttcttaataaatatgataacactattttccaataggtaaataaaaagtatagttatttttaaaatattatttgtagaatgctaaagtttattaattcaaacaagtgagcatatataggggagtatagtattaatgtgaaaagaatatttacatactaaaaacccttaaagttgtacaattcgttaatatttttagaatcagataacaaaaaaatgtgcaaaatcacttttgcacatttacaaatactagttttctgataagattaataataacactttaaatagcgtttaataaatgaagggggcaagtcttatgacgttttacaatttcatcatgggttttcaaaatgataacacaccatttggtatattggccgaacacgttagtgaagataaagcattccctcgattagaagaaagacaccaagtaattagagcatatgtgatgtctaattacacagatcatcaattaattgaaactacaaatagagctattagcttatatatggcaaattaatttgagtagtaccaattatgatgtattagtgcatcccaaatatcttttgttttaaagtttatttcatcatttcttatcgaaaatggtgtaataatgtctttatctaaccaagtgtttataagttcatttggtacaccatctaacaacatttcacttttactaattataaaacattcccagtcaagtgaaacattttgtggattcacataattacattgattatgattatccataaacactcactcctttaaaattctgtactcttcattgcgttttaccccgtcacattatcttttaaactaaaatcatcattacttatgaaaaaaatgttcatcaaaagcaaaggttttcgctaccgaaaaagtttaaataatggtttaatatatttggtactcattttaataaaaagagaatacattttgagctatcaatactttttattgaagaggtgttattgttggctaaaacgttatatttaatgcgccacggacaaactttgtttaattttaagggactaattcagggatttggagattcgccgctaacagaacttggaattgctcaagctcaaaaggcacgtagctattatgaaactaaggggataaacttcgatttatatgcatcatcaacgcaagaacgtgcaagtgacacacttgaaaatgttgcacctaatcaatcgtatcaacgttttaagggactgaaggaatggcattttggattatttgaaggtgagtcagtctatctatttgataatctatacaagcctgaagacttattcggagatcgaattgttcctttcaaaggagaggcaaggcaacaagttgaagatcgcattgtgaaaactttacatgacattatgtctcaaacaaagaataatgcattagtcgtgagtcatggaacaataatgggagtatttttaagatattgccttaaactagatgaagcattaaagcataatatcggtaattgtaatatcttgaaatttgaatatgacaatggaacatttaaatttgttgagttaattgatccaaatttataataaataaagcgttatacatagacacaagtatgtcttttgtataacgcttttaaaatacaactacatgacgctttagaataataattgaataagtttttgtaatatcatcagagcaacaataataattattatgcttgatattttattgattattgttaataattttccggttttatcaattgatccaaccatttttcctaaaattgcgagtaaaaagaaccataaccatgaaacgctaatacaagcgattgtaaacgcaattttattgctgccactatataatgcagcactactaccaattacaccaattgtatctaaaatagcatgtggattgagtaatgaaactgataaagcaaaacttacttgtttcattggagacataatttgagcttctccatctgttgagggtttatcatgccaaatggtccaagccatatacatcaagaaaattaaaccaactatataaataattgcttgaagtataggtaaagacataataatgatagaaactcctaccactgcaataataataagtaagctgtctgacaacccggctgtaattattgcaagcaatacatatctatattttggttgattagctccttggttaaaaataaatacattttgtgcacctaaaggtaaaattagaccaatcgctaagataaatccatgaataattgcggttaccattaagttttgacacccctaaaacatagaatattctgaaaaaacttattgatatcataccaaataaaaaacaactactcaatagtagagtagttgtatgaaaaatagattaatatatgatttgaatttatgagaaatgtagaatatataaaactgtattacttattaatcaaatcataaaaaagccaatgttcatcgaaataggtatttccgattttaattgcatttttctcaaaaccaagaatgtcgaatcctagtgcactatagaaaactttagcacctatgttgtttgacacaattgatgtaagtaaagattcgtaattgttctgccgtgcataattaataatgaaattaatgagctcgctattaatcgatttatcgttattagtaacaaagttgtatttaattaatgatttatgttcttttccaacgtatcgaatttgttctaaggcagctgttgcgataagtgtttcgttttcataacagccaaatacaatacatttcggtgaaccttgatttaaaatgtcatgtattaaggtgtcagtcattgtttgactataatgtgaatcttgagtgaattcttcattgactgtcgaaacaagtctcttatactcattaaaatcattattcgttaatgttttaatttcaatcattactgacctccttaatcattattaagaaagattttgtactaaaaaaatttcttaattacatattaaaatgtttattaaaattttgcaatcattgatttatatgcacattcttgtaaatggattatcaatttaattatatttatttttaagttcagggaattatggaattggttattggtcgacactggacttttatttgtagacggtatgcgaagaagtcaagccagtattggaaccggtcacatttatgatgactaagggacaatcattttcagttaaatattgccagaaatttcaatcacgattagaaaaaataaccaaccaaaaatttttggttggcaaatttgaattttatgtgaattttattaataacgttgaataatctctttaagttaatgctaatctacaacatttacatttaaatcgacattaatatttccttgagtcgcttttgaatatggacaaaattcatgagccatttgtaaatatttttcagcttcttcttgagatataacatttttaattgtcgcatcaattgaaacacttaatttaggactttctgagtctggatcatcttctagtctcactgttagtgttacttctggatgagcatcacgcactttgttttgctttaaaattaggtcgaaggcaccgttgaagcaagatgcataacctgctgcaaataattgttcggggttagtagctttaccatctgcttgagcaggcggaacgatatcaatatctaatgctcgatcatcagtataaacatgtcctttacgtccgccaacattcgtcgctttagtttcataatgtattgccattcttataacctcctaatttaaaatacatttatgctttacccattcgaaaataccttaatcatattcatttatagcattgtttgattgaaggataaaaagttgttgtttacaataaaaataatgagtatctgaaatgagggatttactatgacacatgtggaagtagtagcgactatcgcgccacaattatatatcgaagaaactttaattcaaaaaattaatcatcgtattgatgcaatagacgtattagaattacgaattgatcaaattgaaaatgtcacagttgatcaagtggcagaaatgattacaaagctgaaggttatgcaagattcattcaaattattggttacgtatcgtacaaagttacaaggtggctatgggcaatttacaaatgactcgtatcttaatttaatatcagacttagcaaatatcaatggcatagatatgattgatatagaatggcaagcagatattgacattgaaaaacatcaacgaatcattacacatttgcaacagtataataaagaggtgattatatcacatcataatttcgaaagtacgcctccattagatgaattgcaatttatattttttaaaatgcaaaaattcaacccagaatacgttaaattagcagtaatgccacataataaaaatgatgtgctaaatttattgcaggcaatgtctacattttcagatactatggactgcaaagttgttggtatttcaatgtctaaacttggactaataagtagaacggctcaaggcgtttttggtggtgcgttgacttatggttgtatcggagaaccacaagctccaggacagattgatgttactgatttaaaagcacaagtgactttatactaataaaatgaattaggttgcttttgtgtaagtgctgtcttataattgagaagtattatcattgttcgtggaggagcgattttagatggaattacaacaagcaatagctaatagaagaagtgtgaaaaaatttaaaagagatatgcacatagatgacgcattgctatatcaagcaattgagaaagctgctgatgctccaaatcacggaatgagggaaccatggagagttgtgcatgttccgaaagacagattaggagatatgagtaaggatatttctaaatttgcatttcctaatgaattagataagcaacaatgtcattatgatgcagtaacgaaactaggtggcatgttattgcttattttaaaaacagatccaagacaacgtcaaaatgatgaaaactactttgcatttggtgcatatgcacaaaatcttatgttgttactttatgaagcgggaataggtacatgttggaaatcgccattatatatctatgatcctaaagtaagaaaaacacttggtataaagaaagatgaagttcttgctggattcttatatttaacggatttagaagaagatatgcctaaagcaccacgtaaaaatagaaacttaattacattatattaatatgtataattatagaaacattaataaaagctgagtcatgaattgatggacatctatcgagttagagatttaatctaacttactagagtcggtacaatcacagtctcagctttttattgtgcagtatatacacatttgtattttagtatttatttaaaagtttctgctaaaaatgattcaacttgttcaggtgacttagcatttgctgaatgaaggtgtgcaattttgtcgccgtttttaaatactagcaagctagggatacccataacttcattttcaacaactacatcttctaattcatcacgattaacagtataccattggtaatcattatattgttctacgattgggtcaatccataaatccatagcacgacagtctgggcaccatcctgcctcaaatttaacgattacaggtgtatcgctattaattacagatttaaatgattcattacttttgattgcttgcattgtaacaactcctctagatagtttaataatttttattatagctaaatttatatcataataaaaaattttagcttcaaaatgaaagccttttgctatggaaaatgatatatttattttaaatacataaaggaggttgcagtcgtatgattaaattttaccaatataagaattgtacaacttgtaaaaaggcagcaaagtttttagatgaatatggcgtaagttatgaaccaattgatatcgttcaacatacacctacaataaatgaatttaaaacaataattgcaaatacaggcgtagaaattaataaattgtttaatacacacggtgcgaaatatcgtgagcttgatttgaaaaataaattacaaactttatcagatgatgaaaagttagagttgttatcatctgatggtatgttagtaaagcgtcctctagcagtaatgggcgataagataacattaggatttaaagaagatcaatataaagagacttggttagcgtaagtataatgtaaacgtttactaaatatctcgatatttagattcattacatgtaaaatgaaataagctatacaattgttaatttttataaatatagttgaatagcatctagccttatggcatcattaatgatgtaaagattaattaggaggggattctcttggcagtaccaaatgaattgaaatattcaaaagagcatgaatgggttaaagttgaaggtaatgtagcaacaattggaatcacagaatacgcacaaagcgagttaggtgatattgtttttgttgaattaccagaaacagatgatgaaattaatgaaggggatacgtttggtagcgtagaatcagttaaaactgtatcagaattatatgcaccaatctctggtaaagtagttgaagtcaacgaagaactagaagatagtcccgaatttgtaaatgaatctccatacgaaaaagcatggatggtaaaagtagaaattagtgatgaaagtcagcttgaagctttattaacagctgaaaaatattcagaaatgattggtgaataatcaccgtgtaactccttaatctaagattgaggagtttatttttagtctgagcaagtaaataatatgaaagaaaatttattaggtactattatttggagtattgctacattttattattcaagaatgatgaaaataatgaatttagctattttaaaaataaagattgggggagtaaatatggtaaacattcaagacgttagtcatctttctaaaaaggagcaaaaagcatataaccgtttcgtagaatctgtagaaaacggtaatttaccagtactaccatgtattgaaatggatctaaaagagatgcaagaagaaacattaaaccagagtaagattggtggaatgccatttttaaaatcttttaaagatataccattagatgaaaataatgtaccaatggtattgttagcacagattaatttgaatgatcttccagaacaacaagaattatttcctgtaaatgaagggatattgcagttttggattagttcagaagatcaaatgtatggtatgtctgaaaatttaaagggaaacaatataaactcaaggcttgtttatataaaagagccaattacagatttatcactcaaagatattcaagcgcatttgaagtcattagatgctgataatgaggatatcccgttcagcggagcattttctatagaatttagattgtcgaaacaaactattacatgtactgattataagtacgatgaggacgatcttgcattgtggaataaagtcaatccatccttcgcgctaaaatcaatgtttggtggttatgatgaattaatggaacctgtgtgtaacacatttactgctaaggaaccatttaatcaacttggtggttatccatattttgaccaaatagatccaagaacgaacgatcaagaactgaaaatgtatgatagagtcttactgcaaattgattctacaagagatggtaattcttcgattatatggggtgatttaggtattgccaatatcttagtaaaatctactgaccttgaggctatgaagtttgatgattacatgtattcatgggattgcagctaagagaatcataaaaatatattactttaataagtgtagtatctgtagatcaatctagggagtgggacagaaatgataaagaaccactagtgatttataatgtagtggttctttttcataagccacagctaatgtgtacttaaaaataggaatacatgagtaaaactcatgcataagaaatactaatttctaaagaaaaagtatatctttatgtttgggcccaccccaacttgcacattgcttgtaagctgacttaccgtcagcttctgtgttggggcccaccccaacttgcattgcttgtaagctgactttccgtcagcttctatgttggggccccgctataattgaaaaaggcttgttataggtgtattttcttttggttaactattggtaatatatcattgtagattttaggatgttgatttatggtttagcctttgtctgcttatgttaaatgtcccagctagtcaaacattgattttgtaattattatattaagctagtttaaatttttgtgatttatgttttattcataccaattttgtgaaatgatacagtgacagatgtttattgattttaaagggtgatgatgatggctattgtaaataaagtgataattgttgaagggaaatctgataaaaaaagggtgcaacaggttattgcagaaccagtcaatattatttgtactcatggaacaatgagtatagataagcttgatgatatgatagaatcactatatgataaacaagtttttgtattagccgattctaatgacgaaggagatcgaattagaaattggtttaaacgttatttgagtgaaagtgaacatatatttattgataaaacttactgtcaagttgcgaattgccccaaacaatatttggcgcatgtactttcaaaacatggctttacttgtaagaaagaaacacctttcttaccgaatataaataatgaaaggttagttttagtaaatgaataattcattagacatcaaagatgtaactacattttatgaggaagataaacatttaatctatggttatacaccaacttgtggtacgtgtaaggtttcagaaagaatgttagacattactaatgaaatattgcagttgccattattgaaaatagatttaaacttttatcctcagttttgtaaagatatgcaaatcatgtctacgccgattttattgttgatgaataaagataaagaagtaaaacgaatttatgcatttcaatcggtgactgatttgttagaaaatttaaaatagttattgacgaaattttactaaggtgttaggattaatacaaattaaatgatgcgtaaactcttatcgagagtggtggagggatgtgccctacgaagcccggcaaccgtcttatatagaaatggtgccaattcacataaagttttaacttttgaagatgagagaaacaatactactattgctttctcaatttttctatcgatattgagaaagcattttttattttattaagcaacacagggaggaatcaacgtgattgaattaaaagaagttgttaaagaatatcggactaaaaataaagaagtccttgctgtagatcacgttaatttatcgattcgagcaggatcgatttatggcgtcattggtttttctggagcaggaaaaagtactttgattcgaatgtttaatcatttagaagcgcctacatcaggtgaagttattatagatggagaccatataggccgattgtccaaaaatggattaagagcaaaaagacaaaaagtaagtatgatcttccaacattttaatttgttatggtcaaggactgtgttaaaaaatattatgtttccgcttgaaattgcaggtgtccctagaaggagagcaaagcaaaaagcattagaacttgtcgaactcgtcggtttaaaaggtagagaaaaggcttatccatcagagttatcaggcggacaaaagcaacgcgttgggattgcacgagcgttagctaatgatccaacagtcttgctttgtgatgaggcaacaagtgcacttgatccgcaaacaacagatgaaattttagatctactactaaaaattagagaacaacaaaatttaacaattatactaattacgcatgaaatgcatgtcattcgtcgtatttgtgatgaagttgcagttatggaaagtggtaaagtgatagaacatggaccggtgacacaggtttttgaaaatccgcaacacgctgtgacaaaacgatttgtgaaagaagatttaaatgatgatttcgaaacatctttaacagaattagagccattagaaaaagatgcttatatcgttagattagttttcgctggttcaacaacaaccgagcctattgtatcgagtctatcaactgcctatgatattaaaattaatattttagaagcaaatattaaaaatacaaaaaatggaacagtcggctttttagttctgcatattccatatatttcaagtatagatttcggaaaattcgaaaaagagttaattgagcgacaagttaaaatggaggtgttaagacatgggtaaatcatttagtgaaattataaatgaaatgattacaatgcctaatattcagtggccagaagtttggactgcaatagtcgaaacactatacatgacagtcgtctcaactatatttgcatttatactcggtcttattttaggtgtgttattattcttgtctgctaaaggtaagtctattggtgcaaggttattttattctatcgtttctttcattgttaacttatttagagcgataccatttattattttaattttattattaattccatttacaagtttgatacttggaacgataagtggtccgacaggtgcgttaccagcattgatcattggcgcagcgccgttttatgcaaggctcgtagaaattgcttttaaagaaattgataaaggtgtcatcgaagcggcctggtcaatgggtgctaatacttggacagtaattcgtaaagtcctcttacctgaagccatgccagcgctagtgtctggcattacagttacagcaatcgctttagttggttcaacggcagttgcaggtgtaattggtgccggtggtttaggaaatttagcatacttaacaggtttcactcgaaatcaaaatgatgtcattttagtatcaacagtttttattttaattattgtatttataatccaattcattggggattggcttacaaataaacttgataaacgataaattgggggtttcattttatgaaaaaattatttggtcttattttagtattaacatttgcagttgtattagcagcttgcggtaatggaagcaaaagtggcagtgacgacaagaaaataacagtaggtgcttcaccagcaccacatgctgaaattttagaaaaagcaaaaccattattagagaaaaaaggttatgaactagatattaaaacaattaacgattacactacgcctaataaattactagacaaaggtgaaattgacgcaaactatttccaacatacaccatatttaaacacagagaaaaaggataaaggttacaaaatcgtaagtgccggtaatgttcacttagaacctatggctgtatactctaaaaagtataaaagtttaaaagaattaccaaaaggtgcaacagtttatgtgtctaataatccagctgaacaaggacgcttcttaaaattcttcgttgatgcaggtttaattaagatcaaaaaaggcgtaaaaattgaagatgctaagtttagtgatattacagagaataaaaaagatattaagtttaataataaacaatcagcagaattcttacctaaaatttatcaaaatgaagacgcggatgctgttatcattaattcaaactttgcaatcgaacaaaaactaaatcctaaaaaagattctattgctgtagaaagtgcgaaagataatccttatgcaaacttaattgctgttaaagaaggacatcaagatgataagaaaatcaaagcattaattgaagtattacaatctaaagatattcaagacttcattaatgaaaaatacaacggtgcagttattcctgctaaataattgcaattaaataataaaaccctttaacaacaatagttaaggggcttttttatggtgttggaaatagaaaaagggcataaaaggggcagtatatgcaaattatcgaattttaaacaaaaaaatacgctcagatttgagcgcattatccaagctttacctgttcaagtttgttcatcatatccttatccatctgttcagtaacgtgtgaataaatagaaagtgttgtacggtggtcggaatggcctacacgatccataatagctttaagtgacactccttgttgagagagtaatgatatgtggctatgtcttaatatatgtgaagaaatttctttttcaatacccacatctttagctgattccctaaggattttattgaatctttcagtctgcattgggttgcctttatgattagtaaatacaaaatttctatttagatatccatcattccattttgaatcctttttgttctccagtattgctttctttaatatctcgcaacttctgctactcaatccaattgttctataactagactctgttttagtggtatcttttacaccgaatccaccagattcatcgtgaaaccaatggatggttccgttaatatttaaactcttattatcaaagtctatatcttcatttttaatggctaacatttcaccaatacgcataccatttaaggcttggaattctgtcatgagtgcaacgaataaataaaaccgcttatggatacctgagtgcatcttctgagccttcatattaatatctttgatgatagattgtatttcatttaattcgaggtatttattacgtttagctttcacttcatcataagacttaatccttttatttaacgttatatcttttaaaaattctaaatcttgcagtttgtagatgcgtctagtgtattcaaatacatttttgaatatgcttaacgcatctttgtttacttgatatacataacctttactatccatttcatcgaaaacttgttgtgcatatgaaagtgttattttattgattaaaatatcttcatctacaaatttcttcaaagtgtttagcttactcaatttagttttaatagttgttctttttgacccagacgttttgatataattctgaaaccactcatcacatgcgacatgaaaagttaatgattttaacgttgtcggtgtattatcattcagttttgcctctatacgctcatttaagcgtctctgagcctctttctgcgactgcttaccattcttattgagaaccacgctaacacgtcgccatttatttgtgagagggtctttgtacttctcataatagcgatatttagtttcaccatgtttattagtaaatttctcgtaccacatgtgagtgagcctcctaaaagtcatattttgtcattcttatttcattttcttttttaattttttctaaaacatagtttatagttggaaggttatttaatgtaatatttctattattataaatttgagcaaatagtaattcgcagatttcatcacaaaagtttttatctgtatcttcgaaagatttaatatcttcatagaataagtttttaaataaacgtctactaacgttgtctataaataacatgttttcataatattcaagatgataattaaaatatataaatagtctatctataatgttttcttcactagagtataggaaagctgctgagtggataccttgtgttactgataaataagtagcataattagtatattttcttataacgtctttatctttattagtctttttatagtaaagcactaaactatttatgatatttgctgttctatgatctgaattatttgatttttgattttgttgtaataaataaaaataaatatactctattttatcatctatatttaatacttcttttgccattttatgtgctgaacctaatgaaataattggactgttataaaagtgtaaaatatattccgtttcaccaattattttattcccctttgaagttggaacatatacttgtggtagtttaatcgcattttcatctatattagttttgattctttctatcaattctggcttatttccacttaatttgagtttatattctcttaatatttcttttaattctgggactttaagataaaataaagaaacatcaaaattcgattttatatctagataatttaagttgattaatttgtttagaatttcatctacattaatttggttttctagcaaataaaaatgatttttaacttcttttccaacttctctatttttatttaggtgcaatattaaaatatcgttagcatttaaatcataatgataattattgttgttatcatctttaacatctataactaaatcttgattattttcttggacattttcattcaattttacttggtctttatttaatgtattagttttattgtttgtaattgactttacctgttttacttttttagtattattagtttcaatatcatgtgtgatattatttttcctaatatggtcatttgattgaacagtgttaaactgagtcgtcttagaattagatatatttttgtgattagtattggatttattgcttttataatctaaatgattatgcttaaacaatttaactatactaaatacaataagagaaataaaaatagcaaacataaaaatatctataaaagtcaatttattttgagtaacttcatttattcctccaaatagcattaaaatagaaaatatcaatagaaagcaataaaatatctttttcattattttcccctttgcttaattttgtattatttttgattttcatcattatatattctttgaattactgaattaacaatctcgcttaacatttttttatcgctttctgataaaacttcattaaaaccaagagaatttttgttatctatgccactataaaacagcttatattcagactggtttaatagccattttaaatcaaagtaaggctcgtctatttcctcaatttggtattgattaaattcgttcatagtaagtttaatttcttttctttggattttacttgaatgctttttttgtttttctcggaattttttaacaaactcgtcatattctgttctcaattgttcatagcttatttttttgttttcactaaatatagttagtaatttttcaatatcatcatgcatttgagattgatccataaacaatacataccaaaataaaatatttttagatggaaagcgcttaccattttctaatttactaacatacacatctgatacacctaagtactttgaaagagtatctaaagttaaatcttctgcttttctaaaatttttaagaatgtttgaaaaatcttcaagactattttgttgcatgttttatcaatcctcctgtaaatatcctattgtctatgttgattattatacttttattcttattgttcgtaaacaagtaattaaaaacttgccaaaaggaagctaagatgttactatttgtttgtaaacaaaattaaagtttacaaacatttagcgtgaggaggtgtttttatgattgctaaagtgaattatttgaaacgtttgattgcatttgaaggattgagtttaaaagattttgcaagcgaaatagaagtgaattctaactttttgaattccattgttaatggtaaaagaacgacatccccaaaaacagctaataaaatagcgaaaagactcaatgttgatataaaagatattttcatctttatagaagaaaaagaggaggtcaaataaatggctagaacaaagttgaaagatataccgactaaggaaaatacaatcagtgaaccaaaacaagttgtagtaaaaccactgtttgctaaaccaaacgcgctagcaagtatttttggtatttcgtatagttcgacaaatcgtattttaaaagagtgggagaaagatcctaaaggtgttgacgatttgtattattcattgtcatcaactatgacggttatcagtattcctagatttgaggagtacatgaagaaacgtcataaaaaatggatgtaggaggcaaggcaatgaaaatgtacttaacttatatttgcttagtttcattgttaacaatactattactagcaatatctaacatgtatgtcgcttttagtgtgtacggcatgatggtaacttatggatttaatttaacaggagagattacaacgtgcgaaaacaagtgattattacaaaaacagtagttggctggtacaacattaaagatactcaacataatttaatgttaaatataccgccaaaagtatttgaacagtgctttcctgatgttagtaaagatgttcaagttgcgtgtttagaaatggatttatcaaaaattacagaaattaaaaataagaaaaaggtaggtagttaagatgaaaatcaaacaaaaatatcaattatcaaaagtggttaaagtattagaagtagtattatacgagaaaagtaaaacttatgatgatattagttatctcaatgaggatacagcattttatgaatatgctttaaagttagttcataatggattgttcaatattcttgctgaattagattttgaagatgaagcatttttaattcttgatgaagtaacaatgacgctaagtgatgtcatgaaagaaacacaacacgtttaccgttatagtgtcatagacgaaaaaggtgaacataaacatacaacagatcgcaaaggacacgggattggaatgttagagtgggcattagattacattgtgggaaatattgaagtggaggaattataaatgaattgggagattagaaatttaatgtgcaatatagagatagtaaaagaaaagttggaagatgtagcgactacacatacatggtttgtagatgaacgatttaggaagagatcgttaaaaactaaagaagaagcggttaattacggtctagcgtataacgaacatagaattcacaacgaacaagttacagaattaatgcttacttatttgaaagaattagacggtttaatgaataagtttcatgaaatagaaaaagcgtcacttcaagccgaccaaagcgaaagtaacgcatagcatttaataaaaataacagagtaatttaaaaattacatatttttattataacattttttactctgtgaatcactagaggtgcaaaaaatgaatgaaattaaattagaatatgacacacatgtttcagtggtacattatgaaagtttagactcacgttcatttaagagcttttcaaaacctaaatggagtaagttaattaataaactgtctgtgcctatagaagcaaattataagtatgcacgtggtgttgctgtttacggtgatattaaaaatggtgcaaatgatcatggtgaaattatcaaaaagcatcgcaatgacgttaatgtcgtatacagagatgtgattgtacttgattacgatgaaataaatgatttaaagcaattacatgaagcaatcagctcagctttaagcaatgttgcatggttttggcacacaagttactcgcacagaactgaacaagctagaatacgcctgtatatccctctaaatgagcggataagtgcagatgattatcgtaaatattcaaaggtattagcaaacaaaattggtcataaagttgatgaaggttcatatcagccaagtagatgttttgcattaccagttattcaaaaagggcacatatttattaaacgagtgaatgactgtccaattatcgatgttgatatgctcgaacagtggtcgaaggaacttgaacaatcaaatgctagtcctaatgttatagggtacacgcgacgtgatagtgcgtactggcgtgagttaagctttggaacaaccgaaggcaatcgtaacaatgcactagctagcttagttgggcatttattaagatgtcgcgtcaatgattatattgtgtattcatatgctttattatgggggcaattcgcatgtaaaccacctatgaaagaacaagaaatcaacgccacttttcaatcgatattaaataaacactataacaattagaaaggggctttgtatggaaacaggtaaaagtgatgtacttgataaaattgaaaaaattaataaaaaagatagtgccttacaagaaattataccgaaaggctatgaaattgaacatcatcaatgcggtgttgccttatatcaacttataccaagtaaaaaagaaggtgaaccagataaaaaggtttttatcacaagtacaatccctcaaatcactgaacgctttgaagatattgaaagtaacgaagtcagctttaatatgcttttctatgacaataaaacgcctgtaaatatagcagtgagtgccgaagaaatttcagatagtcgtcaactcttgaaattggttaataaaaagctagatgtaacatcgtcgacatctactaaacttgttgactatattaatgtatctaaacggtataatccaccattaaatgttaaagttgcaacgcgtttggggcatgtgaaaggttattttatttatccttatcaagaagtaatgaaagacagcaatgtcaagttgtttagcaatgataaagggtttcaaaagttaatagactcttttcgaagtaaaggaacactacaaggttactctaaaaaggtgtttgctcaaataaaagatttaccaatggtgatggttatgttgtatgcatctttaggttcggttttattaagagaatttggattacagccctttattgtagaaatatcaggtagtacatccacaggtaaaacattcacactcaacttagtatcaagtgtttggggaaccagtgaccttattacgacatggagttctactcaaaatagtattgaatcgatggcgtcatttttgaactcatttccaatgtttaaagatgatacacgtaacacacatcctaagtttgttaccagtgccacatataacttttctagtggcgaaagcaaatcaagaagtaatattaatttaacactaaacgctaaaaaagaatggcgaaatattttaatttctactggtgaatcatctatcgcaaatatggctgatgaaaaagcgggtgtatcagcacgtgtagttacactacaagatccaccatatccagataattttgattttaccacattagacaaatcgtttagggagaactatggaacgttagggttggcatttattaaacaatatgagtctaaaaaagacgtgtataagaaagcttttgagagctatcaacggtattttaatcaaaaaggtagtaatgaaatcatgcaacgtttaggacgcgcctttgcgttactacaagttaccggtgaggttttgaatgatattgatggatttgaacatgatcattttaaaattattgaacaagcctatgacagcatggttaaaaacaataagacgattgataaacctaagcaactgttagaggaactattacaatatttagatgcgaatagaaataatattgctggtgatggttatagttcagtcaaaaatggcgacatcaaagctatatataaacgtgattatttatgtatattaggtgaaacagtcaaagagaagttaacacacgaattgcaaaccatcactggacaatgggacaaaaaaggatatttaattaaaggtgaaaaagacaggttacaaaaacaggtcaaacatcaaacggtaaagtataggggatttgctataaggcgagaagtacttgaagaattgggttttgacttttctaattcatataatcctaattctgattattgataagtacccatcggtacccgttgagtacccaataaaaaaataaaacgggtactcaataaacgcagtaatatcaagtctctaaagccataagtacccgaagtacccaatgtttattaatagtatttaattaaaataagttgttttgtaagaacattcatataatacaggtttcctattatataaaatacgggtacaacgggtactttttgcataaagtaacgtagtgataagagtttgatagtacccgaagtaaaagaatcactggggactcactgggtactagtcctctactaaaataaaaaacatcaaattaatgctggaggttacacatggataaagaacaacttaaaaagtatatatacgattatgtaaaagaatataaggagataccgatatatcagttagaagatttgtttaaagaactgaatcacgactatatagggagaactagtatcacacacgataaggatgagaatattgtgttttggagtggatggaacaaaattacaatgtttgcgttgattgaattagttaaaagtgaacaacttgatttagtgtatagaggtagttttgtaatgcgttatttgttggatggtagagttcctaatttaccattagctatttgttatccagaagatggacaacaaactgacgtgccctcatgggtgcctatggtattaagaataaataaagaggagaaaatcaaatgaacttagaaactatcgtaaaccaatttgaaacacgagcaggcacgttactaaggtactacacaggattattagaacatagtaaagtgcaaccatgttgctttaagttatacaatgatccatttgatatggcatacgtgatgatgaacagcaagctattcggtcatgtatatattaaagattgtaaagtaaggcaatcatttgaattagcgtcacctaagcacactgaggggcttataagaagcatagaggggcattatgtaggttatgaattacatgacggtaaacatctttctattagtgatatgatggctagtcatttgtttgaagatgagtattttatgtatggattacaaacatatgcagaatcaaataatagtgatgtgtttgagtacctagaaaatggatttgatacagatacacttgagggcattcaatcaagtaatactgatgtgatagcgaatattgaaatgttgtatcagttagctacgggaatcaatgaaccagaaccagagttagttgagggattgaagttggtaactgagtttatacaagatgagaatgcgacgcaagaggattacaaggctttagagcataagttaactgagttgaagtcatcttattacagtttgaataagtaattaaatatggagtctcacgtggtgtgtggctcctaatataaaagtataaggtatagaagttttaaaatgtaaaggttgcaacaatagtgagttaatagataggtaggcgaaattcaaaaaagtgtgaaatgttgatattgagctgttttatggctttgaaaataataaggttatataaaggtgttagcttttaaaatcggaaggtatacagtctttgagaattgaaaaaatggcaagatttgtgcaaggtgtgcgaactttgttaacgctaatacaagctaaagtttgtgtttttggcataggcctaaaagttaagtttgttcgctgtttgttcgtgttattttatcgaacttaagttcgatattaggttaatgtgaaaagcctaacgttaagtttataacatgattttataagtgttatatatgataagctaaacaattgataaaacgcgctataaagcgaacgtaagtttgttttagacctgtaaaaatggtataatttaggtatgaaataattaaaagaaagaggtgtagaaatgcaaagtatcgcagaaaaagagacgtatcatttacccaccgaacacctgcaagttttcaatgtgataaaaaatacgtccaataagtatattactaaaactaaaatcttaaatcaattgggatatgaatataattcaagcaatgaacgatggttacgaagagtaatcaattcattagtatatgattatggctatcctatcgggtgcagttataaacctagtgaacgtggttattacatcattacgacagaacaagaaaagcaacaagcgatgagaagtattaagaaattagctgatggcagtatgaaacgctatgaagctttgaaacgaattaaagtgtaaaggggataaaaatgaaaactgaatcgtactttaaagaatacaaccaatttgtaatagatcaacaaaaggctatacaagaattgaaacaagagcgtaatgcattggagagtaaaataaagatagataagtccacatataaacagttaatcatggatggacaagatgataaagcagataacctatatcaagcaacagatgctgatgaaaagaaactaaaagcacttaataaacgcttagagacaaagaaaagtgtgtcgaaagaagttaaatatcaaaagacaattgaattattaaaacatcaaagcgagttgtcatcattatacgaatcagaaaagcaatcagctttaggtaaattaaaaaaagtagtcgatgcatataatgagatcattgatgaaatagaagatattaatgatagatatgaagatgagcatcagcaatatgcgagtatttatagtcaagaacaattatatgatgataaagaggctagggaagcattgaatggctactttagagaaaatatatttacatcatatattaatggtaatgatttgccatacgaacacaataacaagttgtttttaaaacgttaaaaagaaagggtaattaaatggaaacaaaatacgagttaaataatactaaaaaggtcgcaaatgcatttggtttaaatgaagaagatacaaatctattaataaatgcagttgatttggatattaaaaacaatatgcaggagatttcaagtgagttacaacaatcagaacagtctaagcaaaagcaattaggtacaacgctacaaaatttagctaagcaaaacaggattattaaatagcaatgattgcctatccaattcgggtaggctctgtttataggggtgaataaatgaaactgcttaaaacgaagaattgtttatattatcgtaatggcgacaataaactatctgagtatcaactattaacgcaatttaacccagcatttattaataaaaaaattaagatgtgtgaattccaaattgaaagtatgtaccatatgagtgcgtcgaccacaacatgtgatgaaataatgggggtcgtgtctgtctcatatccgattgaaaaattagttatcaaaattattgaaacaaaagcagggttacaaaactataaaaatagatctataaataatatggcgttgttgaaaaaggtactaaatcattatacagaaaaagagcagaagcaagttgtaaaatatatgcgttcaaatggacgatataagccctacaacgtcattgaacgcttacaagttgatttgtatcaagcaagtattaaacaacgttcagaacgtcaaaaacaaagaaatacagcaattgaaaatagcaagattgcacgagtaaatgcttatcaccaatcttcacatgtaaaagtggtgtaacaatggataaaaaacaaataaaaggcatcgtgtgtgattatcataagcgaactagaagtgatgtattaatagatgatgatataaatactgatgaattcttttcaataggtgatgaaaattccaatgaatggatggcagacgataacattgatgatcatattgtaaagaatcacttagaaatgattgttgaccgagtagcgaccgataaagagttttatatttttgactcccttatacaaggacgtagttatcaagatattagtggtgtcttagattgttcagaacaatctgtaagattatggtatgaaaccttattagataaaattgtggaggtgatagaatgagtgagttaacggcaaaacaagcgcgttttgtgaatgagtatattagaacacttaatgttacacaaagtgctataaaagcaggttatagcgcaaatagtgcacatgtgacagggtgtaggttattgaagaagccacacatcaagcaatatatacaagaacaaaaagataagattatagatgagaatgtattaaccgcaaaagagttactacatgtgcttacgaatgcggcagtcggtgatgaaacagaaacgaaagaagttgtagtcaagcgaggggaatataaagagaatccacaaagtggcaaagtacagctagtctataacgaacatgttgaactggtagaggtgccaattaagccaagtgatcgtttaaaagctcgtgatatgttggggaaatactataagttatttacagataagcatgatattaacggcaatgtgcctatattcattaacattggtgaatgggacggagacgatgaggaattagataaggcagtgaaaaatgtatctaacgctaatcctaatcatactgtgattttggatgatataccattagaggattgaggagattgaaacatcgtttaattgtgatatatagtaatcataacatttaaaaatttgttaaaattagtactaggtactaaaatgtagtataatgattttgtgtagttgcaactaatgtcattccctgatattagttgctttttttaatatgaaacctttttattttgtacaactaaatatataataaaaaataactacacatgaaagaggttaaggggaaagtgaataaagatattaaaattaaaatcattaagattactactcctattgagtttgagaaagatgaaaaaaatactgctcatgtaggagatttctttgactttaatagatttaattattgtattaaagaaaaaatgaaattaagtgaaaaagacagacttaaaacttataaaaaaactgaaagtttttatattgaaaattataatgaagattttagcgacgatttcgcagttggaaattttatttctttaaagcatggctttatatcagataatttaaatattactgaatttaaagtaacaagacaaaacgagaaagatgatgctattaaaaataaagtcagttttttaattgataaaaagagtggatatttttatattgttaatgatgagttacacgttatcaattttgaaagattaagaaattacttttttataaaaaaacctaaaagaatgaaatatataaataaattcaatgaagaaaatcctaatgcatttatagatgaaaacaataataagctttatatgatagagttattagaacctttaccatttcttgaaaagattagtaagttaacaacagtcaaaagtattaaaattaatccttcaaaaacaataattgaagatgaaaaagataataatatttttgatgatttgaaacaaaatttagataaaaataatgttggagaatatcagacagagattaaacttactaaatttaaaaataagaaacttactaatgaattaaaaaattttattgaatatttagcaaaaagtaaaaaatatgaagatatcgctgtggaaggaaatgtaagtaataattatcctaaaaaaattactgaagattcaacaactagagacttttatgtaaaaaacgaagttgatgtaaaaggttttccgaaagaacaacaattatttcaaaatattcaaagagttattgaagaagaggatcaattgaatgttgacaactctcaatataaagagattaaaggggtaaaattatagagggacggagtgttaattatgagtagaagaacaaacaatttagataatactagttttaaaacaaagaaaacacgatttctttatacatgcaattttttaaaagattttaaaaaaggatttaaaaaattagatttatgtatacttattatattattagtaattattttttgcttcgtttgtgaaattataaaatataaacttgattctaatttagatgttctaaaaaaatttgttcctcttttgttaacttattattcaattactattggttttactctatcttctctaacttttatggctgggaatattgaaaaatataaaagtaaggctaagaaacttttcaaaaatataataacattttgtatatcttatattgttatttcattaattactattatagtttatttaagcttatttctagttatgcattattttaattttgaaggtacgaattattggattaagttatttacttattatatttcgttaattttacctataatttccatttatatatttataaaaataactttaattatttatctcttctcactaaacctctctatgaataatgaaaaataattataaacgcatgcgaacaattcaataaaatatcactaaagaaacgtcactttcgagtggcgttttttgtattttaagacgctgagaaacgcactgtgttgcagtgagcgattagtgtgtatatagaaatagataaagtgtagatatagatttgtaaataatagactaatatttgagatagatactttgcttctatctctttaaaaaagacaagttacattaaaaaagtaacctgtctttaaccatgattagtttatcgtgatgttatctatatcctttttaaataacatcaattgtttatgatcattatagtcatcaccaactttagctgaaattgggggatcatttttatctttactatggatagttactgtgtcgccgtttttaacgatttgtttctcttttaatttgtcagttaattttttccatgcatcatttgcgtcaaacctatttccgtttggatttattcttgacaaatcaattcttttaacactatcggtattaatcggtttgttattagaattgctaagttcatttaaattggcggtaccttcaatactgttttcaccgccatttggtaatttataagtcactttgacattttcattatctgttttatcgataatattagcctctttcaaagcatctcttacatttttccacaactgtccgtctgttgtttcagcagcttttgcaacgttattaataccattataatttgaagaagaatgaaaacctgaacctactgttgttaaaactaaagcacttgctatcaatgtttttgttaatagttttttattcattttattttctcctataacttatttgcaatcgattacaaagtaattttacaattattatttatgtaaatcaattaaataattattaacaaatccataaaattttatcattaaaatataataattttgagctagaaatattcgtcatttatgctataatcgttttagacacagcaatgtgttcaaattttcatctattcgtaagttagccttcgggctgactttttatttccattattcacatgttaatcttgttgttgtttaggcaggtacttcggtacttgcctatttttttatgcaaattttaaaaaacacttgaataataaacatttgtttagtataattatatttgtaggttagttgatgacttacaaattatgtgtaaggaggtgaaaagcctcatgctagacataataaaaacacttctagaacatcaagtattggcagtactgataattccagaagtgttaaaacaacttagagaatggcatctcggctacctagaccgaaagccaaacaacaaagattaacattatgcttggagcctgacggctcctccttacacttatataatataatattatttggaggttttcaattatgacagaacaaatgtatttattattgtttttattaagcctaccattgttattatttatcgggagaaaaacacatttttattgtttagataaaaagaatggacgtagataatatgagtgattataaattaaaaataattgaattgatcaaaagtgatataacaggttaccaaattcacaaacaaactggcgtagcgcaatatgtaatttcacaattaaggcaaggaaagcgcgaagtagataacttaactttaaatacaactgaaaaactatacagttacgcacgacaagtgttataatataaatgtgaaatggtcattcttgaaatgactcggtcgctactggcacagatcgtttaaagtgtcaccacaacatgaactgagaattcatatgacgttgctgacgagcgacaaagctctgtgttcctggatgggagtaagtttgtgtggtggtgcataacaagtcgctgaaatatttgcgacataataaagcatattatcggttttattaagtgctaaaggcacattttaaccacccatactagttactgggtggttgttttttatgttatattataaatgatcaaaccacaccacctattaatttaggagtgtggttattttcaagggcaaaaaaagggcataattttaaaacaaagggcaagggtatgaactataaaataccttgaaacacttataaatgcctatataaaagcattttgaatgctcatggatttccttgataatacaatttgttattcctgctaaataattaataattaagctcattgactgatatgctcccatcaaagtagacattgaaaaaatgcaaactttgatgggggttttttttaattagaatcaatatgaaatgtagaagatttaatatgataagagatgaataactatatataaatgattatcaagtcattatgtattaagtgaagcctatacgcttctgtgacttcaatcaatgtccaaagctttacaatgatatataagcagtagttgattgaatgaaaatacgattgtaacaacctttttacaataattgcggggccccaacatagagaatttcgaaaagaaattctacaggcaatgcgagttggggttgggcccaacatagaagctgatggaaagccagcatacaataatgtgcaagttggcggggccccaacacagaggatttcgaaaagaaattctacaaacaatgcgagttggggttggtcccaatacagaagctgacgaaaagccagcttacaataatgtgcaagttggggggcggggccccaacacagagaatttcaaaaagaaattctacaaacaatgcaagttggggttggatgacgaaataaattttgcgaaaatatcatttcagtcccactcccaagaaccatttcataataaatcattagtgattctttattattttagttccgctccctcaagttaatgatgaatctatttcgctagttataaaatgacgtcaaatcaatatcaaaaattatttaagtaaaatgtttagataatttttcagtgggtaagtattatatataacatttaattattccgaggaggcatttattatggcagacgaaagtaaatttgaacaagcaaaaggtaatgttaaagaaacagtaggtaatgttactgataataaaaatttagaaaacgaaggtaaagaagataaagcttctggtaaagcgaaagaattcgttgaaaatgcaaaagaaaaagcaactgattttattgataaagtaaaaggtaacaaaggagagtaattttactttatattcctaatacactgcacatgccacttagtcggtataaccatcggctaggtggttttttgtattaaaaaagtggataccaaaatttattaataattattttaatgttagaaaaaaactaaataaaaactcgttaatgatatccaataatatgtatacaaaacgagacatatattgcatatgattaacgagatactgaatatattttatcacccctaaaatgattattcattttcagcggtaattcgacctaaagtcaaacttacaataaaaccgatgataaatactactaatgaaacgaaccacatcacgatattagttggtaaacctggaaatactgcaaagagggagccaacaacaaaaccaatgattaatgcaaaagtcattagtttatgatgtgttaggaaatactggataattttgcttgaaataatgaatccagcaagcacgccaaatccgactgcaagtaatataggaagaccggcaaagttaagtttaacaacttcagatattgctagcatgaccgtaccatagacgccaaatactaataacataaatgaccctgaaatacctgggagtaacatagcactagatgcacacatacctgcaataaagtatttaataataagaccagttgatagagtaagtgtttctccagcatgtttatcgctattattcattaatgtaataacaattaagatagcgataccagctataaccatcatgtaatgtttagttgtaaatgacgttttatagttagaaattttcaataaatatggaacgataccaatgattaatccaccaaagaaaaacatagttggaatatggtgttggcttaataaataattaaaaagattacttagtgatcccattgccagtaacattccaattataatagggattaaaaatgtaaaacttggccaaaaacgtcgtgagaatatgccactaattgaagcgataaattgattgtatatacctaacaataatgcaatagtcccaccgctaacaccaggtaccaagtcactcgttcccatagcaaaaccttttagaatattaatccatttaaattgttgcatgaataactcctttcaaacgattggaataaaatcataaatagcatcataccatattacaaatgtcctagtgaaatgataacatattttaaattcataaaatccattgagaaattatgtgttcttattatcatttatatttttaaagagagcggattagagttgtactttagagttattaaaaataataaaaagggtttaagttgtttatattaaggtataagtaagttataattaactgaacgcattattacaaagtctttttgactacaaattaaaattattataaactagttaagaaaactttatattttacggagggaatataaaatggcatcaacattagaaatcaaagacctacatgtgtctattgaggataaagaaatcttaaaaggtgttaacttgacaattaacactgatgaaatacatgcgattatgggaccaaacgggacaggtaaatcaactttgtcatctgcaattatgggacacccaagttatgaagtaactaaaggagaagtacttttagacggtgtaaatattttagaattagaagttgatgaaagagcaaaagcaggattattcttggcaatgcaatatccatcagaaattacaggtgttacaaatgctgatttcatgcgttcagctatcaatgcgaaacgtgaagaaggacaagaaatcaacttaatgcaatttattaagaaattagataaaaatatggattttctagacatagataaagacatggcacaacgttatttaaatgaaggtttctcaggtggagagaagaaacgtaacgaaatcttacaattaatgatgttagaacctaagtttgcaatcttagatgaaatcgattcagggttagacatcgatgcattaaaagttgtatctaaaggtattaaccaaatgcgtggggaaaactttggtgcattaatgatcacacactatcaacgattattaaattacattactcctgataaagtacatgtaatgtatgctggtaaggtcgttaaatctggtggtccagaattagcaaaacatcttgaagaagaaggatatgaatgggttaaagaagagttcggttcagctgaataatcttattaatacagtatccatgagatgttcatctatatatgatgaaaatgaacatttatacgaaatagtaaatttcatcaagtaggaggaaaaagttatgacaactgatattttgaacatttctgaagaacaacttgttgattattctaaagcccacaatgaaccttcttggatgacagaattacgtaaaaaagctttgaaattaacagaaactttagaaatgccaaaacctgataaaacaaaattaagaaaatgggattttgattcttttaaacaacacgatgtaaaaggtgatgtttatcaatctttatcacaattacctgagtcagtaagagaaattattgacgtagatcattctaaaaacttagtaattcaacataataatacgattgcgtacacacaagttgatgataatgcatcgaaagatggcgttatcgttgaaggtttagcagatgctcttatgaaccatagtgatttagtacaaaagtactttatgaaagatgcagtaacagtagatgaacatcgtatcacagcgctacacacggcattagttaatggtggcgtatttgtttatgttcctaaaaatgtagttgtagaacatccagtacaatacgttgtgttgcacgacgacgaaaatgcaagcttttataaccatgtcatcatcgttactgaagaaagcgccgaagtcacatatgttgaaaattacttatcaaatgcatctggtgaaggaaatcaattaaatattatttctgaagtgattgctggtgcaaattcaaatatcacatatggctcagtagactatatggataaaggctttacaggtcatatcattcgacgtggtattactgaagcggatgcctcaattaattgggcattaggtttaatgaatgagggtagccaaattattgataatacaacaaatttatttggtgatcgttcaacaagttcacttaaatcagtagttgtaggtacaggcgaacaaaaaattaatctaacatctaaaatcgtacaatatggtaaagaaactgatggttatatccttaaacatggtgttatgaaagaacatgcatcatctgtatttaatggtatcggctacattaagcatggtggaactaaatcaattgctaatcaggaatcacgtgtattaatgttatctgaacatgctcgtggtgacgcgaatcctattttattaattgatgaagatgatgtacaagctggtcatgctgcatcagtaggtcgtgttgatccagatcaactttactatttaatgagtcgtgggatttctcaaagagaagcggaacgtcttgttatacatggtttcttagatccagtagtacgtgaattacctatcgaagacgttaaacgtcaattgagagaagtaattgaacgcaaagtttctaaataatattttgaaaataaaagtttgtaatagatatagactgtcgatattggtataagactaatacaacgtcagtatttaaatgattaggatttttatttaagaaaggtcgtgaatgaagtggccgaacactcatttgacgttaatgaagtaatcaaggattttccgatattagatcaaaaagtcaatggcaaacgtttagcatatcttgattcaacagcgacaagtcaaacgcctgtgcaagtgttaaatgttttagaagattactacaagcgttataattcaaacgttcatcgtggtgttcatacattaggatcattagcaactgatggttatgaaaatgcccgtgaaaccgttcgtcgttttattaatgcgaagtattttgaagaaatcatttttacacgcggaacaactgcgtcgattaaccttgtagcacatagctatggtgatgcaaatgttgaagagggcgatgaaattgttgtcactgaaatggaacatcatgccaatattgttccttggcaacagttagcaaagcgtaaaaatgcgacattgaaatttataccaatgacagctgacggtgaattaaacatcgaggatattaagcaaacgattaatgataaaacaaagatcgttgctattgcacatatttctaatgtactcggtacaattaatgatgttaaaaccattgcagaaatagctcatcaacatggtgcaattatcagtgttgatggggcgcaagcagcaccacatatgaaacttgatatgcaagaaatgaatgctgatttttatagttttagtggacataaaatgcttggaccaacaggtattggcgtattatttggtaaacgtgagttactacaaaaaatggaaccgattgagttcggtggcgacatgattgattttgtaagtaagtatgatgcaacatgggctgatttacctactaaatttgaggcgggtactccattaattgctcaagcaattgggcttgcagaagctattcgctatttagaacgcataggttttgatgcaattcataaatatgaacaagaattaacgatatatgcttatgagcaaatgtctgcaattgaaggaattgaaatttatggcccgccaaaggatcgtcgtgcaggtgtaataacgtttaatttacaagatgtacatccacacgatgttgctacagccgtagatacagaaggtgtagcggttagagctgggcatcattgtgcgcaaccgttaatgaaatggttaaatgtgtcttcaacagctagagcgagtttttatatatacaacacgaaagaagacgttgatcagttaattaatgccttgaaacaaacgaaggagtttttctcttatgaattttaataatctagatcaattatatagatctgtcattatggatcattataaaaatcctagaaataaaggtgtattagataacgggtctatgacagtagatatgaataacccgacatgcggtgaccgtatacgactaacatttgatatagaagacggcattataaaagatgctaagtttgaaggtgaaggttgttcgatttcaatggcaagtgcatcgatgatgacacaagccgttaaaggtcattcacttggagaagcaatgcaaatgagccaagaatttacgaaaatgatgcttggtgaagactatgtgattacagaagaaatgggagatattgaagcatttcaaggtgtatctcaattcccagctcgtattaaatgtgccacattagcttggaaagcattggaaaaaggtactgttgctaaagaaggtaaagcagaaggtacgactgaagaagaatagaatgctgttaatcatagatgattttgatattagacatataatagtaaaaaaatttttatatgatgtcatgtcattgttataatatggtttacatcatgaattaaaaacttacgcacgccgttgtaaatatatttttaaggagtgattgaaatggctaaaaaagcacctgatgttggggattataaatatggattccacgacgatgatgtgtccattttcagatcagaacgtggtttaactgagaatatcgttagagaaatttctaacatgaaaaatgagccggaatggatgttagatttccgtcttaaatcattaaaattgttttataaaatgccaatgcctcaatggggtggcgacttatcagaattgaatttcgatgacattacttactatgtaaagccttcagaacaagctgaacgttcatgggatgaagtgcctgaagaaattaaaagaactttcgataaattaggaattcctgaagctgaacaaaaatatttagctggtgtttctgctcaatatgaatctgaagttgtttaccataatatggaaaaagaacttgaagaaaaaggtattatctttaaagatacagatagtgctttacaagaaaatgaagaattattcaaaaaatactttgcttctgtagtacctgcagcagataacaaatttgcggcgttaaactcagcagtatggtcaggtggttcgttcatttatgtacctaaaaatatcaaactagatacgccactacaagcttatttccgtattaactctgagaacatgggtcaatttgaacgtacattaatcattgctgatgaaggtgcttctgtacattacgtagaaggttgtactgcaccagtttatacaactagttctttacactctgctgttgtggaaatcattgtgcataaagatgcgcacgttcgttatactacgattcaaaactgggcgaacaatgtatacaatttagttacgaaacgtacttttgtttatgaaaacggaaatatggaatgggtagatggtaacttaggttctaagttaacgatgaaatatccaaactgtgttcttttaggtgaaggtgcaaaaggtagtacattatctattgcatttgctggtaaaggacaagttcaagatgccggtgctaaaatgattcataaagcgccaaatacatcttcaacgattgtttctaaatctatttctaaaaatggtggtaaagttatttatcgcggtattgttcattttggacgtaaagcaaaaggcgctcgttcaaatattgaatgtgatacattaatcttagataacgaatcaacatcagatacaattccatataacgaagtattcaacgatcaaatatcattagaacatgaagcgaaggtttcaaaagtttctgaagaacaattattctatctaatgagtcgtggtatttctgaagaagaagcgacagaaatgattgttatgggattcatcgaaccatttacaaaagaacttccaatggaatacgcggtcgaaatgaaccgtttaatcaagttcgaaatggaaggtagtattgggtagctttaaaccgcgttgttaagccattcttaactgtcgaaaacggttattgataccattttgatactgaatataacaaaaagccacattactgtggctttttttgttttataactaaatcggattgatagataagctttgtacttatttatatcagtccgattttttgattggtgtaaaaaataatcattgatgctagataaagcgacaacataaatacaacatgattgtggcattagagtgctggtctttattaaattaattgaaaactacatcaaatatcctttaaagataattcgataatagttcgattaagtttcgttgtataagtgagttaaaataagaaaactattaataaaattaagttcactacagatgttgctaatggaccgtaagttttaaagacatctttacttttataaccaacaatcgcatctaaaaattgaactaaaatcattgcaatggatatagttatcaaaaatatagcactatgaatgactaaagaaaaaatagctaataaaaataaaggtaagcttcgactaagtgcataatatgcatttatattatggctagatgcacaagcttgaattgaataacctaaactcacactggcactaatgagtgtaaatattgctaaaacaaaatacatgttaatccttctttctatatttgaatatctgtaaacaagtacttgtctaaagatatttaaaagataattagaataaatttatgagaaactttttgttatcattatagcgatttcaaatcattataactatgtcataaactaaatttgttaaaatttttcattatgtaaatttattaataacaattaggtcgaattatagcatcattttactaataaatacattaaagtagctatgattaaaaatgcatattaattatcattattaagtctattatatataatgaattttaactggtttattaaacgagaacgtcgggaattaggtaactacaataaaaataagatatgacaataaggagactacacgcgtgatcattgccataattatattgatatttatttcgtttttcttttcaggaagcgagacggcattaacggctgccaataaaacaaaatttaaaactgaagctgacaaaggtgataaaaaagcaaaaggcattgtaaagttacttgaaaaaccaagtgagtttattacaactattctaattgggaataatgtcgcgaatattttattaccaacacttgttacaattatggctttacgttgggggattagcgttgggattgcatcagctgttttaacagttgttatcattttgatttccgaagtgattcccaagtctgtcgctgcaacatttccagataaaataacaaggcttgtatatccaattataaatatttgtgtcattgtgttccgtcctatcacattacttttaaataagttgacggacagtattaatcgaagtttatctaagggtcaacctcaagaacatcaattttcaaaagaagaatttaaaacaatgttagcaattgctggacatgaaggtgctttaaatgaaattgagacgagtaggttggaaggtgtcattaattttgaaaatttaaaagtaaaagatgttgatacaacacctagaattaatgtgacggcatttgcttcaaatgcgacatacgaagaagtttatgaaacggttatgaataagccatacactagatatccagtgtacgagggagatattgataacattattggggtgtttcattctaaatatctgttggcttggagtaataaaaaagaagatcaaattacaaactattcagctaagccattatttgtgaatgaacacaataaagctgaatgggtattacgtaagatgactatttctagaaaacatttagcaattgtgttggacgaatttggtggtactgaagcgatagtgtcacatgaagacttaattgaagaattattaggtatggaaattgaagatgagatggataaaaaggaaaaagaaaaactttctcaacagcaaattcaatttcaacaacggaaaaatcgcaacgtatctatataaggagcgaacagctatgtggaataagaaccgacttactcaaatgttaagtattgaatatccaattatacaagcaggtatggcaggaagtacgacaccgaaattagttgcatcagtaagtaacagtggtggattaggcacaataggcgcaggttactttaatacgcagcaattagaagacgaaatagattatgtacgccaattaacgtcaaattcttttggtgtaaatgtctttgtaccaagtcaacaatcatataccagtagtcaaattgaaaatatgaatgcatggttaaaaccttatcgacgcgcattacatttagaagagccggttgtaaaaattaccgaagaacaacaatttaagtgtcatattgatacgataattaaaaagcaagtgcctgtatgttgttttacttttggaattccaaatgaatctattataaaaagattgaaagaagcaaacattaagctaataggtacagcaacaagtgttgatgaagctattgcgaatgaaaaagcaggtatggatgctatcgttgctcaaggtagtgaagcaggtggacatcgtggttcatttttaaaacctaaaaatcaattacctatggttggaacaatatctttagtgccacaaattgtagatgtcgtttcaattccggtcattgccgctggtggaattatggacggtagaggagttttggcaagtattgtcttaggtgcagaaggggtacaaatgggcaccgcatttttaacatcacaagatagtaatgcatcagaactactgcgagatgcaattataaatagtaaagaaacagatacagtcgttacaaaagcgtttagtggaaagcttgcacgcggtatcaacaataggtttatcgaagaaatgtcccaatacgaaggcgacatcccagattatccaatacaaaatgagctaacaagtagcataagaaaagccgcagcaaacatcggcgacaaagagttaacacatatgtggagtggacaaagcccgcgactagcaacaacgcatcccgccaacaccatcatgtccaatataatcaatcaaattaatcaaatcatgcaatataaataatcgaccgcaatccacaaaagcacaagcacccccaaacattattttagtgcttgtcatttttgtggattgcgtttctattttaccaatctagtcaaacgaaattatcgagctaaagttcgctgaaatgtttatgatcaaacgaaatcatcaagctaaagttcactgaaatgattataatctaacgaaaacatcaaactaaagttcgctgaaatgattatgataaaagttatatggtatgatgacattggtgatatatatgataaacatcggattaacaggttggggtgatcactattcattatatgaagatttagaacgccaaaccgataaacttaaaacatatgctggacattttccggttgtcgaattagatgcgacatactatgcgatacaaccggaaagaaatatattgaaatggataaaagaaacgcctgatacatttgaatttgtggtcaaaattcatcaagcactcacattgcatgcagactacaaaacatttgcagatacaaggcaagaactatttgatcaatttaaaaatatgttagagcccttacatacacagaaaaaattagcaatggtattagttcaatttcctccgtggtttgactgcaatgcacaaaatatcaaatatattttgtatgtaagacagcaattacaagcatttccaatgtgtgtagaatttaggcatcaatcatggtttagtgatgcatttaaagaacaaacattggcatttttaacagaacatcagatcattcatgcagtagttgatgaaccacaagtgaaagatggcagtgtacctttagtcaatcgaatcacaaatgaaattgcgtttgtacgttatcatggacgtaatcattatggttggactaagaaagatatgtcagatcaagaatggcgagatgtacgctatttatatgattataatgagcaagaattaatagacttagcacaaaaggcacaaatattagcgcaaaaagctaagaaagtttacgtcatatttaacaataattctggtggtcatgcagcaaataatgccaaaacatatcagcgattattgaatatagaatatgaagggttagcaccacaacaattaaaattattttaagaggcgacgactatgttattaacaattacattattagttctaatcggtggtttgtcagcgattatagggtcaatcgtaggcattggaggcggtattattatcgttccaacaatggtttacctcggtgttgaacatggattactacataatattacaacgcaaatagcgattgggacatcgtctgtcattctaattgtgacaggactttcttcatcgcttggatatctaaaaacaaaacaagttgatattaaaaatggctctatctttttatttggattattaccaggttcattgcttgggtcattcattagtagatatttaacatttgagtcatttaatttatattttggaatctttttaatctttgtagctattttattaatggtaagaaataagattaaaccgtttaaaacatttgataaaccaaagtatgaaaaaacttatgtagacgctaaaggtaaaacatatcattatagtgtgccaccattgtttgcttttattacaacgtttttaattggtatattgacaggtttatttggtattggaggtggcgcactaatgacgccactaatgcttattgtatttagatttccacctcatgtagctgttggaacaagtatgatgatgattttcttttcaagtgtcatgagttctatagggcacattgctcaaggtcacgtagcttggggttatgcaatcattttaattatatctagttattttggtgcgaaaatcggtgtcaaagtgaatcaatcaattaaatcagatacggtagtaacattattgagaacagtaatgttgttaatgggtatatatttaattattcgtgcgttgatttaatacaactttaaaaggaggacgtcaatttgaggcttacaatttatcatacgaacgatattcatagtcatttacatgaatacgaacgcattaaagcatatatggcagaacaacggccacgacttaatcatccttctttatatgttgatctaggtgatcatgtagatttatccgcacctataacagaagcaactttaggtaaaaagaatgtagcattactaaatgaagcaaaatgtgatgttgcaacaatcggtaataatgaagggatgaccatttcacacgaagctttaaatcacctttacgacgaagcaaaatttatagtgacatgtagcaatgttatagatgaatcaggtcatttaccaaataatatcgtttcttcttatattaaggatatagacggtgtgaaaatactattcgttgcagcgacagcaccttttaccccattttatcgtgcactagattggattgttaccgatccacttgattctataaaagaagaaattgaacatcaacgaggtaaatttgatgtattaatcgtgctaagtcattgtggcattttcttcgatgaaacattatgccaagaattgcctgaaattgatgtcatttttggtagtcatacgcatcattattttgaacatggtgaaattaataatggtgtactgatggcggcagctggaaagtatggtaattatcttggagaggttaatttaacttttgaggcacataaagtagtacataaaactgcaaagattattcctttagaaacattacctgaagttaaaacttcatttgaagaagaaggaaaaacgctaatgtctaatccagtaattcaacatccagtagtgcttaagcgtagtatgaaccacataactgaagctgcatacttattagctcaaagtgtttgtgagtatacacatgctcaatgtgctatcatcaatgctggcttactcgttaaagatattgtaaaagatgaagtgactgaatatgacattcatcaaatgttaccgcatccgattaatatggtaagggttagactttctggtgtgaaattaaaagagattttagctaaaagtaataaacaagaatatatgtatgaacatgcacaaggtttgggtttcagagggaatatatttggaggatatattctttataatttagggtacattcattctacagggcgttactatctgaatggagaagaaatcgaagacgacaaagaatatgtattaggtacgatagatatgtatacgttcggtcgttatttcccaacattgaaagaattaccaaaagagtatttaatgccagagtttttaagagatatatttaaagaaaaattattggaatattaaaaagtaagattattggattttcatttgtcatgaatttcgatataatgtttaaagatacacttaacaggagggtatgtgttgttatggcgacaaaaaacgaggaaatattacgtaaaccggattggttgaaaataaaattaaataccaacgaaaactatacaggacttaagaagatgatgagggaaaaaaatcttaatactgtatgtgaagaagctaaatgtcctaatatacatgaatgttggggtgcacgtcgtacagcgacatttatgattttaggtgccgtatgtacaagagcttgtcgtttttgtgcggttaagacaggtttacctaatgaacttgatttaaatgagcctgaacgtgtagctgaatcagttgaattaatgaacttgaaacacgttgttatcactgctgttgcgcgtgatgatttaagagatgctggttcaaatgtttatgctgagacagtacgtaaagttagagaaagaaatccatttacaacgattgaaattttaccatcagatatgggcggggactatgatgcgttagaaacattaatggcttcaagacctgacattttaaaccataatattgaaactgttcgtcgattaacaccgagagttcgtgcgcgtgcgacatacgacagaacattagagtttttacgtcgttcaaaagaattacaaccggatatcccaactaaatcaagtattatggttggattaggtgaaactatagaagaaatttatgaaacgatggatgatttacgtgcgaatgatgtagatattttaacgattggtcaatatttacaaccttcacgtaaacatttaaaggttcaaaaatattacacgcctttagagtttggtaaattaagaaaagtggcaatggataaagggtttaaacattgtcaagctggacctttagtacgtagttcatatcatgcggatgagcaagtaaatgaagctgctaaagaaaagcaacgccaaggtgaggcacagttaaatagttaatatttaaccattaataaggcataaaggcttagtttgtacaaaacgaacgtgtcatagaagtaatcattatttttatgaaacactaaagtataaactgagcctttcattgtcatagataggtgaagaatttgataaaagtagatcaacattactttgaattaatagaaaattatcgcgaatgttttaatgaagaacaatttattgctaggtattcagatattttagataaatatgattacattgttggtgactatggttacgatcaattacgattaaaaggtttttacaaagattctaataaaaaagcagagatgagtaaacgtttttcaaatattcaagattacatatttgaatattgtaactttggttgtccttactttgtattaagacatttgtctaaacaagaggttaaaaagttaatcgaagaagttcatccgtctgatgtgatagatgacgacaataaacttcaagatgtgaagattaagccaaccattcaagatactgaacattaataaaacccttagctagattgaaaatgggaatcatgcaattcaagcatggacctgtaatctagttaggggtttttatctttaatgaatgacttcatttaaatactctgtaatttcatcgccttcttcagcatttacacctaaaatatgagcaatatagccttcttcttttaaatcatcagtaccgataataccgaatttatttgtttgcatattaagtacgagtgtcttaccataatgtctatttgtatggactagcattaaatcatatcgactatgctcgccaacaaaaccaacaaactgaacttgactctcttcgttgtcatcatataaatacatatcaatcattttgtagcgactccttttaaaagtagtaaagttagtataacgacaaatgaagtatactgcaaaattatgataatatataagcgagaggtgacaaggaatgtattttgtagacaaagataaactaactcagaaattagcctatttacaagcattaactgatgattatcatgagagtaagcacaatcattatgcatttgaacgcattgctcaaatgttgatagaatcatcggtagatatagggaatatgattatcgatgcatttattttaagggatcctggtaattataaagatgtgattgatatattagaactagaaaatgttattactaaagaaacacagcaggcgattaataaaactgtcgatattcgtaaacaatttacatatgattacacagccttagatattaaggttatcatgccaatgtttgatgacgcattaccttattacaaacaatttattacagaagtaacgacatttttacatcaagaaaatgtaccagtaacagcttttggtaaaggagaaaatcaataatgaaacagtataaagcgtatttaatcgatttagatggcacaatgtatatgggaacagatgagattgatggagcaaaacaattcatcgattatttaaatgtaaaaggtattcctcatttatacgtaactaataattcaacgaaaacacctgagcaagtaactgaaaaattacgtgaaatgcacattgatgctaaaccagaagaggttgtaacgtcagcgttagccactgcagattatatttcagaacaatcaccaggagcatcagtatatatgttaggtggtagtggtttaaatactgcgttaaccgaagcgggacttgtcattaaaaatgacgagcatgttgattatgtagttattggacttgacgaacaagttacatatgaaaagcttgcgattgcaacgttaggtgtaagaaatggggcaacatttatttctacaaatccagatgtgtcaattccaaaagagcgaggatttttaccagggaatggtgctattacaagtgttgtaagtgtatcgacaggtgtatcgccacaatttattggtaaaccagaaccgattattatggttaaagcattagaaattttaggactagataaatccgaagttgctatggtaggcgatttgtacgataccgatattatgtctggtattaacgtaggtatggatacgattcatgtacaaacaggtgtatctacgttagaagatgtgcaaaataaaaatgtgccaccaacgtattcttttaaagatttaaatgaagcaatagctgaattagaaaaatagatatagtcattttataaagtaggtgaattgatttggtaaaaatagttgtttcgaggaaaattccagataaattttatcaacaattgagtaaacttggtgacgttgttatgtggcaaaaatcattagtgcctatgcctaaagatcaatttgtgacagcacttcgtgacgcagatgcttgttttatcacattaagtgaacagatcgatgcagaaattttagcacaatcaccaaatttaaaagtaattgcgaatatggctgtaggatatgacaacatcgatgttgaaagtgcaacagcgaacaacgtggttgtcacgaatacaccaaatgttcttactgaaacaactgcagaattaggatttacattaatgcttgctacagcacgtcgtattgtagaagctgaaaaatatgtagaagcagatgcatggcaaagctggggtccttatttattgtcaggtaaagatgtcttcaattcaactgttggaatatatggtatgggagatattggtaaagcttttgcaagaaggttgcaagggtttaatactaaaattctttatcataatcgatcaagacataaagatgcagaggcggactttaatgcaacatatgtttcttttgaaacgttgttagcagaaagtgattttatcatctgtacagcgccacttacaaaagaaacacatcataaatttaatgctgaagcatttgaacaaatgaaaaatgatgcaatttttattaatatcggtagagggcaaattgtagatgaaacagcattaatcgatgcactagacaataaagaaatattagcatgtggtttagatgtattagcaaatgaaccaattgatcatacacatccattaatgggacgtgataatgttctgattacaccgcacattggtagcgcatcagtaacaacacgggacaatatgattcaattatgtattaataatatagaagcggttatgacaaatcaggtaccacataatccagtaaattgaaaataagtatggtttttaatcattggtaaacaagcaaagcaattgttaaatatgttatgcttgacatgcgaatgtatatatttgcgctgatgataattcaataacgttataaactcgtcatattaatgtgatgagtttatttgattttgacgtatataacaaaattgttatatagactgtaattgtttattgtttaaataacctttaaaatgaatgatgttctcaacatagtgtatcatttacaataattgagtgatgacaaccaattactatgttgaatctataaaattaaaattgaatttcattatgaatatcgatataatgaattgtaaaaaacaaattttaaaacgtattttatattgaacggtctttataaaggcgtttttactaagaactttaagaggtgcaatatgaaatctaaaagtaaacagccacctaataaatatgttgaagcattcaaaccatatttattaacactattgtatttggcaatatttattactttatatttaatttatggcagtggcgacacacacaataacttcatttataatgagttctaatgagggagacttaatatgacagatattattaacaagctgcaagcgtttgcggatgcaaatccacaaagcattgctgttagacacacaactgatgaattaacttatcaacagttaatggatgagtctagtaaattagcacatcgattacaaggtagtaagaaaccgatgattttattcggtcacatgtcaccatatatgattgttgggatgattggtgccattaaagcaggatgtggatatgtacctgtagacacttcaattcctgaagaccgtattaaaatgattattaacaaggttcaaccagagtttgtatttaatacgactgatgaatcgtttgaaagtttagcaggtgaagtatttacaatagaagatattaaaacatctcaagacccagtaatttttgatagtcagattaaagataacgacacagtatacacaatctttacatctggttctactggggaacctaaaggtgttcaaattgaatatgcaagtttagttcaatttactgagtggatgttagaacttaataaatcaggaaatgaacaacaatggcttaaccaagcgccattttcatttgatttatctgtaatggctatttatccatgtttagcgtcaggcggtacattaaatcttgtagataaaaacatgattaataaacctaaactattaaatgaaatgctaacagcaacaccgattaacatttgggtatcaacaccatcatttatggaaatgtgtttattattaccaacgcttaatgaagaacagtatggtagtcttaacgaattcttcttctgtggtgaaattctacctcacagagcagcaaaagcgttagtaagccgtttcccaagtgcgacgatttacaacacatatggtccaactgaagctacggtagcagttacaagtattcaaattacacaagaaatcttagatcaatatccgacattacctgttggcgttgaaagaccaggcgcaagattatctacgacagatgaaggtgaacttgttatcgaaggtcaaagtgtaagtttaggatacttaaaaaatgaccaaaaaactgctgaagtatttaatttcgatgacggtattcgtacttatcacactggtgataaagcgaagtttgaaaatggtcaatggttcattcaaggtcgtattgatttccaaatcaaattgaatggctacagaatggaattagaagaaattgaaacacaattacgccagtctgagttcgtaaaagaagcgattgttgtacctgtatataaaaatgataaagttattcatttaattggtgcaattgtgccaacgactgaagttacggacaatgcagaaatgactaaaaatattaaaaatgacttgaaatcacgcttaccagagtatatgattcctagaaagtttgaatggatggaacaattgccattgacttcaaatggtaaaattgacagaaagaaaattgcagaggtaattaacggatgattccatatggtgattttacattcttcttaattgctttaattgcattattaccagtcattatacttggatttttaggtaagcgaagttacatttataatggcgtagttacagcatttatgattgtgttaatcttttcttctgataaacataatctgtttgaccaaaagtatttaagtgttcaattaattagttttattatttacgtcgtatggcaagttttattgataatgttttattatcattcaaaaccaaaaaataattcattttcaaaatttgtaactgtaatggttttatcaatattgccattagcacttgtgaaagtgttacaaagtacatggttaggtggacatcagattcacttccatgaaagtaaattaattgaatttgttggtttcttaggaatttcttatgttacattcaaaagtgtgcagttaattatggaaattcgtgatggttctatcaaagaaattaaagtatggaaattaattcaatttatttcattcttcccaacgatttcatctggaccaatcgatcgttacaaacgtttcgttaaagacgataaaaaagtaccaacaggcaatgaatatcgtgaattagtattaaaagcaattcacatgattatgcttggtttcttgtataaatatattgttgcttactttattaacacatatgcaatcatgccgttacaattagacttacatggctttgtcaatttgtggttatatatgtacgcatacagcctatatttattctttgactttgcaggttatagtttatttgcgatagcatttagttatttattcggtattaaaacaccaccaaacttcgataaacctttcaaagcgaaaaatattaaagatttctggaatagatggcatatgacattatcattctggttcagagattgtatttacatgagatctttattctacatgtctcgtaaaaaattattgaagagtcaatttgcaatgtctaacgtggcattcttaatcaacttcttcataatgggaatttggcatggtatcgaagtgtattacattgtttatggtttataccatgcagcattgtttataggttatggctattatgaacgttggcgcaagaaacatccgccacgttggcaaaatggtttcacaacagcacttagcattgtgattacattccactttgtaacatttggctttttaatcttctcaggtaaacttatataataaaggagaatttaattatggaatttagagaacaagtattaaatttattagcagaagtagcagaaaatgatattgtaaaagaaaatccagacgtagaaatttttgaagaaggtattattgattctttccaaacagttggattattattagagattcaaaataaacttgatatcgaagtatctattatggactttgatagagatgagtgggcaacaccaaataaaatcgttgaagcattagaagagttacgatgaaattaaaaccttttttacccattttaattagtggagcggtattcattgtctttctattattacctgctagttggtttacaggattagtaaatgaaaagactgtagaagataatagaacttcattgacagatcaagtactaaaaggcacactcattcaagataagttatacgaatcaaacaagtattatcctatatacggctctagtgaattaggtaaagatgacccatttaatcctgcaattgcattaaataagcataacgccaacaaaaaagcattcttattaggtgctggtggttctacagacttaattaacgcagttgaacttgcatcacagtatgataaattaaaaggtaagaaattaacatttattatttcaccacaatggtttacaaatcatggtttaacgaatcaaaactttgatgctcgtatgtctcaaactcaaattaatcaaatgttccagcagaaaaacatgtctactgaattaaaacgtcgttatgcacaacgtttattacagtttccacatgtacacaataaagaatacttgaaatcttatgctaaaaaccctaaagaaactaaagatagttatatttctggttttaaagagaatcaattgattaaaatagaagcgattaaatcattgtttgcaatggataaatctccattagaacatgttaaacctgctacaaaaccagacgcttcttgggatgagatgaaacaaaaagcagttgaaattggtaaagctgatactacatcgaataaatttggtattagagatcaatactggaaattaattcaagaaagtaagcgtaaagttagacgtgactatgaattcaatgttaattctccagaattccaagatttagaattacttgtaaaaacaatgcgtgctgctggtgcagatgttcaatatgtaagtattccatcaaacggtgtatggtatgaccacattggtatcgataaagaacgtcgtcaagcagtttataaaaaaatccattctactgttgtagataatggtggtaaaatttacgatatgactgataaagattatgaaaaatatgtaatcagtgatgccgtacacatcggttggaaaggttgggtttatatggatgagcaaattgcgaaacatatgaaaggtgaaccacaacctgaagtagataaacctaaaaattaaaatacaaatagcacataactcaacgattttgattgagggtatgtgctatttttatattttaaatttcatagaatagaatagtaatatgcgcttggatatgtggctattataaaataattaatcagataaatagtataaaataactttcccatcagtccaatttgacagcgaaaaaagacaggtaataactgattataaataattcagtattcctgtctttgttgttattcataatatgctctgttaacttaatatctttatattagaatacttgttctacttctattacaccaggcacttcttcgtgtaatgcacgctcaataccagctttaagagtgattgtagaacttgggcatgtaccacatgcaccatgtaattgtaatttaacaataccgtcttccacgtcaatcaatgagcagtcgccaccatcacgtaataaaaatgggcgaagacgttcaataacttctgctacttgatcaaacatcgttgtatcttcagtaggcatcaggcaagtctcctttcgagagatgaatttgataatctttattagtatattataatagatagtgtaataaaaatctatcaaaccaatgggggataaatatatggagcacgtgagtgtgatagtatatggggcagatgttatatgtgcaagttgcgttaatgcgccaacatcgaaagatatttatgactggctacagccgctattaaaaagaaaatacccaaatatatcatttaaatatacgtatatagatattacaaaagataatgacaacttaacagatcatgatttacaatttattgaaagaatagaacaagatgaactattttatccattaattacaatgaacgatgaatatgtagcagatggttatatacaaacaaagcaaatcactcgatttatagaccaaaagcttgtgaatgaataatatacacataataaaaagcaatgtcagtaatagtgtgaactgacattgctttttaatttttaaccattatgatatttatataaccaaagtacgccggatttcaaaatagaagcgagtcgtcctgttacagtgcgatccatgatatatgcaaaaccttgtttatctcctaatgacccaacgataccttgtacctttagttccggcattttgtcaggtaatggttcatttagccattgctttttaagcacatcggcaatttgatcaccttgaacttctgctaactgagcacttggcgcatgtggtaaatcagcacaatcaccaactacatagacgttacgatatgttggtacttgatgatactggttaactatcacacgtccattactatttatatcaatcggcaagttacgaacaacttcaacaggttgaattcctgctgtccatacaactaaatcaatatctttaggttcatcacagttatatattttaccaggttcaactttattaatatttgaatttggaacaacggtaacattatttttggcgaaccatttcgcaacatacttacttaatttttctggaaaatttcttaaaattcgtggcccacggtcataaagatatatttccaagtctgatctactttctcttaattcgctggcaagttctatgccgcttaatccagcaccaacgataccaactttagcaccttctggtagttcactaatactatggaaagtatcccgagcctttgagagtgtttgaatactatgtgtatattcttcggctcctggaacgttatgatatttatcttcacatcctaaaccaataattagctcatcataatcaattttagaattaccgactgagacaatttgagcatctaaatctatgtcgttaatttcaccataaaccgtattcacttgtggatgattagggaatttcatgcgaacatctttatctgatttcgtgcccgcagctaaagcataaaattctggtttcaatccatgaaatggcatacgatcaactaatgtgactgtataatcttgtggtaaagatgtagttaaaatgcgtgacatgatacgcatattaccatatccgccgcctaacaaaactaagtttttcataatgaagtaccccttttatatgttaatatttactttaattttgaaaagatcaaagtgcatagatatatttgttaatgaacagttataaaatgcaagtgtctttgattcatcaataacccctaaaaaagtaaatatgtatttatatgcttattatatatttttttgaaaatgactacaaataaatatttgtcctaactaaggcactattacataactgggataagaaacatcagttgttgctaattgagcacatcatgttaaaataccagttttaaaatgctataatattgtaacaaatgaaataagaaggtgaagtatgaatccgatcgtagaattttgtctctctaacatggcaaaaggtggagattatgtttttaatcaactggaaaatgacccagatgtcgatgtgttagagtatggttgcctgacacattgtggtatatgttcagccgggttgtatgctttagtaaatggtgatattgttgaaggtgattcgccggaagaattattacaaaatatatatgcgcatataaaagaaacttggattttttaaggaggagttatcatgccaacagttatattaacagaagcagctgcctacgaagtaaaagatatgcttaaagcaaatgaaatgccagatggctatttaaaaattaaagtgaatggtggcgggtgcactggtttaacatacggaatgggtgcagaagaagcgcctggtgaaaatgatgaagtcttagaatactttggattaaaagttttagtagacaaaaaagatgcacccgtattaaatggtacgactattgattttaagcaatcattaatgggtggcggtttccaaatcgacaatcctaatgcaattgcatcatgtggctgtggtagttcatttagaactgcaaaagttgcaggtaatcctgaaaactgctaataaaataactttttaatgattaacccaattttggggatacaaattgatatcaattacgattagggacatatttgattatgtcctatttttgcgtaaagatattttgttttattaaaaatctcattaaaaattaagaatctgactattaatagtattttaaatgatcgtgataacggatacatttttaatcgaaatcaggttacgaaaaaattaattaattttttcacaatctgactgaatcttgcttgaaaatataacataaaagctatagaattagtattggattaaaaatgtcttttttgtgaacatcacaggtttttacataatttaaaagacttaaataacaaaatgatgataaactagtatacattgtggtaaaagtagtaatgaccagttgttactagtaattatcagcatttggttaaaaaaatatgaaagcttaggtgaaattaaatggctcaagatcgtaaaaaagtacttgtacttggtgctggttatgcaggtttacaaactgtaactaaattgcaaaaagcgatatcaacagaagaagcagaaattacgcttattaataaaaatgaatatcactatgaagcaacatggttacatgaagcatcagcaggtacactaaactatgaagatgtattatatcctgtggaaagtgtcttgaagaaagacaaagtgaactttgttcaagcagaagtaacaaaaattgaccgtgatgctaaaaaggtagaaacaaatcaaggtatttatgactttgatattttagtagtagcattaggtttcgttagtgaaacattcggcatcgaaggtatgaaagatcatgctttccaaattgaaaatgttatcacagcacgtgaattatcacgtcatatcgaagacaaatttgctaactatgcagcatcaaaagaaaaagatgataacgatttatctatcttagttggtggtgctggattcactggtgttgaattcttaggtgaattaacagacagaattcctgaattatgtagcaaatatggtgtggatcaaaataaagttaaaatcacttgtgttgaagcagcacctaaaatgttaccaatgttctcagaagaattagttaaccacgcagttagctacttagaagaccgcggtgttgaatttaaaattgctacaccaatcgttgcttgtaacgaaaaaggtttcgtagttgaagtagatggtgaaaaacaacaattaaatgcaggtacttcagtatgggctgctggtgtacgtggtagtaaattaatggaagaatcatttgaaggcgttaaacgtggacgtatcgttacaaagcaagatttaacaatcaatggttacgacaacatttttgttattggtgactgttcagcgtttatcccagctggagaagagcgtccattaccaactacagcacaaattgcaatgcaacaaggtgaaagtgttgctaaaaacattaaacgcatcttaaacggtgaatcaactgaagaattcgaatacgttgatcgtggaactgtttgttctttaggttcacatgacggtgtaggtatggtatttggtaaacctatcgctggtaaaaaagcagcattcatgaaaaaagtgattgatacacgtgcggtattcaaaatcggtggtatcggtttagctttcaaaaaaggtaaattctaggctttaaattaagttacagctaaacacataaaattaaattattcatttataaagtccttcagtgtcactgaagggctttattgttgtacaatttgaagtgagtaacatatcaaatctaaggaggtacattatgaattttaaattaaataacacaataagcaacgaaataaatacattgattattggtataccagaacatttaaatcagttagagcgcattagttttaatcatatcgatattacagaatcacttgaaagactaaaacatcaacatattattggtagtaaagttgggaagatttatacaactgcatttgatgtacaagatcaaacatatcgtttaattacagttggtttaggaaacttaaaaacacgtagttatcaagatatgttgaaaatatggggacatcttttccaatacataaagtcagaacacattgaagatacgtatttacttatggattcatttatttcaaaatatgatcagttatcagatgtattaatggcatgcggtattcaaagtgagcgtgcaacatatgaattcgatcattataaatcaagtaagaaggcaccgtttaagacaaatttaaaccttattagtgaatcattaattgaattagattttattcatgaaggtatcagtattggccagtccattaatttggcaagagactttagtaatatgccaccgaatgtattaacaccacaaacatttgcagaagatattgttaatcattttaaaaatacaaaggtcaaagtagaggttaaagattatgacactttagtttctgaaggatttggacttttacaagcggtaggtaaaggtagtaagcataaaccgagattagtaaccatcacatataatggcaaagacaaagatgaagcaccaattgccttagttggtaaaggtataacgtatgattctggtggttatagtattaaaacgaagaatggcatggctacaatgaaatatgacatgtgtggcgctgcgaatgtcgttggtatcattgaagcggctagtcgtttacaactgcctgtaaatattgtcggagtgcttgcttgtgctgaaaatatgataaatgaagcatcaatgaagccagatgatgtatttacagcgttaagtggtgaaactgtagaagtaatgaatacagacgctgaaggtagattagtccttgcagatgctgtgtattatgcaaatcaatatcagcctagtgtgattatggactttgctacattaacgggtgcagccatcgttgcacttggcgatgataaagctgctgcatttgaatcgaatagtaaagtgatattaaacgacatattacaaataagttctaaagtcgatgaaatggtatttgaattaccgattactgcaaccgaacgtgcaagtattaaacacagtgatatcgctgatttagttaaccatacgaatggacaaggtaaagcgctatttgcggcaagttttgtaacacattttagtggtcaaacacctcacattcatttcgatattgcaggtccagcaacgactaataaagcttcatataatggtccaaaagggccaacaggatttatgattccgacgatagtacaatggttaaaacaacaataatttaattatttgcctgatacaacttgtgtcttgttatacatttctaatttaactcttgaaagtataaaggatcgcattgtatcaggcattttcattgttgtaagaaaatataaatcgcatatccttgtgagcataaatcaacttgattagcattgcaaaaacttattataagcatatgttcattcagtcaacgactactaatataacattatagaacttaggattttgattggtgttccagacttgtaaaattgtttaatttaatgaaagcgaaaattattttaagaaagacaattaactaaaaaataaagattattggtatagtttgctattgacaggtgttaaagctactgatactatgtagtctataaacgctttagttcgatagagtgataaagggtggttgtcatatgataaatgcagtagtaatagcagtaatattaatgattgtgctatgtttatgtcgattaaacgtagttataagcttatttatcagtgcgctagtaggtggcttaatttcaggcatgagcattgaaaaagttataaatgtatttgggaaaaatatagtcgatggtgctgaggtagcattaagctatgccttattaggtggatttgcagcattaatttcatacagtggtatcacagactatttagtaggaaaaataataaatgcaattcacgctgaaaatagtcgatggtcaagagttaaagtgaaagtgacaataatcattgcattattagctatgagtatcatgagtcaaaacttaattcctgtacatattgcattcattccaattgtcatcccaccattattaagtctgtttaatgacttaaaaatagatagacgtttaatcggtttgattatcggttttggtttatgtttcccgtatgtgttattaccatatggattcggtcaaattttccagcaaattattcaaagtggctttgcaaaggcgaatcacccaattgagtttaatatgatttggaaagcaatgcttattccttcaatggggtatattgttggcttacttatcggtttatatgtatatcgtaaaccacgtgaatatgaaacacgtaaaatttcagatagtgacaatgttacagagttaaaaccatatatcttaatagtaacaattgtggcaatactagctacatttttagtacaaacgtttacagattcaatgatttttggtgcactggccggggtactcgtattctttatttcacgtgcatataattggtatgaattagatgctaagtttgttgaaggtattaaaattatggcttatattggtgtagttattttaacagcaaatggatttgctggtgtaatgaatgctactggtgatatagatgaattagttaaaactttaacaagtattactggtgataataaattatttagcattatcatgatgtatgtgataggtttaattgtcactttaggtattggatcatcatttgcaacaattcctattatcgcatcattattcattccttttggagcgtcaattggactagatacaatggcattaatcgcattgattggaacagcgagtgcattaggtgactcaggttcacctgcaagtgattcaacattaggaccaactgcgggattaaatgttgatggccaacatgatcatatacgcgatacatgtgtaccaaacttcttgttttataatattcctttaatgattttcggtactattgctgctatggtactataagcataaagaggtgaaaatatgactcatttattagagacatttgagatgtcaatagatcaccaggaagatggtttagttgttatttctatgcctgttactgataaagtaaaacaaccatttggatatttacatggcggtgcttcgattgctttaggtgaaacagcatgttcattaggatctgctaatctaattgatacaaccaaatttattccattaggtttagagatgaatgccaatcatattcattctgctaaagatggtcgtgttattgcgacagctgaaattattcatcaaggtaagtcaacacatgtatgggatataaaaattaagaatgacaaagaacaattaattacagttatgcgtggtacagttgctattaaacctttaaaataaaagaactgctagctgaaaagttatgagatattcataactacggctagcagtttttttatgcgctatattgttgtaattttagaaatgcttgttcaatgcgttcggcagctttacggccacccataacatttctaccaaatggtcctaattctaagtctgcaaagcatcctgcgacatatagatttggtatccattctaatttttcggaaataacagggtaattacattcgttgataggtgcatcataattttgtattaattgcttaataagtggttgtgacataaaatcttgttcaaaaccagttgcaaccataatctgttgatatggaacagaatcattttcagtgttaattaaaccatcactaatttgagtgataggtgttttatgcacatttatacgaccatttttaatatgttttttaaggcgtaagtacagttcgtgaggcattgatcctttatgacgttcacgttgtacaatggcatttctttcaggcatacttttagtacttaaaaatgaagacatatttttcggacctaaccaaccaggatcagcatcaaagtcatgtatttcaatatctttatttagccataaatgaatctttttatcgtcatcatgatttaacaatttaagtgcaagatgtgcagcagtaataccactaccaacgatatgatcggtcttatcatatactacttgatcatgttctttctcgaagatatgatttacattctgtttgtcttttaaaatgtcaggcataaacggaatatttgtactgcctattgcaataacgacgcaatctgtagtgataatttgtccatcttctaacttgatatgccatttgtcttcttgtttatctaaagtttgaactaaaccttgaaccaagcaatcctctaattgatattgtttagaagcatgtgcaatatgatccataaacattgtcaattcaggtcgctgataaggaccataaaaagcatttgtatattggtgctgtttagcgaattgttttagatggaacggttgtggatgtacgtgatgtacaatcggtgatcttaaataaggcatttctattcgatttgtatatgagttaaacctttggcaaaaagtttcatgtgggtcaatgattgttaatcggtctgttgttaatccgcttgataatagtttttgtgcgattgcagttccctgtatgccaccgccgataattgtccaatgcataataaaacctctctctttttaaagcgtaatcgttacgatttataatcattattatcataatacataacgacatgaaaggcaattaaattaaagagatatacctagatagggcgaaggtgtagtcaaagaagtatgtactaaactaaaatcattgaaaaagaggtaacaatgtcaaaagaaaacagcagtaaaatcattcctaatttggaatcatcttactgctgtttgttgttgatttatattcatgactttgttatataatctataattttgtgtcttttaagtcttcagaaatttcatcgactttagtctttttagtataaggcgttttaatattatatgctgctttcataatcatatgacttgaaagaggacctgtaattaatacaaagataatcgcaacgattaattgcatatttacaaaaccttgagtagcaataaaatataaaaacgtaccaaatagtaatgacattgcacctaatgttgatgcttttccggcagcatgtgcacgtgaatatacatcttcaagtctcaataatcctatggctgctagggcgctaattaaagcaccgatgataacaaagataagtgcaagactaatcagtatgattttgatcatgttcaatcaccttacctttgtccataaatttagagaatactgcagtacctaaaaaggctaatataccaatcatcataataacgacaatcatgtatttaatatttaataaaatactgaataatgctataactgccattaattgaagaccaatcgcatctaatgcgacaacacgatcggcaagtgatgggcctagcacaacgcgaatgagcatagctaacatagaaatgacaactatgattaatgcaataacgataataacattatgattcattatatttcgcccacctctcttacaatcttctctaatgatgttttaatactttctacttcttgctctttagttgaaaaatctatggcatgaatataaatttttgtacgatcatcacttacaccaagcactacagtaccaggtgttaatgtaattaaattagacaacaagacaatttgccaatctttttttaaatctgtgtgataaacaaagaatcctggttcatttttaatcgaaggtttaataataattttcaaaacatcaaaattagctttaatcagttcgattaagaaaataataactaatttaataatacgatatagcgtgatgacataaaatctacctggtaacactctgtgtaagaggtaaacaagaactaggccaaagatgaaacctaacacaaagttatttgttgtgtaactatttgtcacaaacaaccaaaacactgcaataataaagtttaaaactaattgtacagccatgttatttacctcctaatacagctttaacgtaggttgatggattgtagaatgtttctgcaccagcttttaccattggatataagtaatctgctgacaatccatataaaacagttatcacaactgcaacgattgcaatcgtagttaaatatttgacgtcgactttgttattaagatcatatccttttggttgaccgaaaaagccttgtaggaatatgcgaatgacagaatataatacgactaaacttgataataagacgatgacaccacttaaataaaatcctctttcaaatgttgattggacaatgaaaaattttccataaaagccactgagtgggggaatgccagctaaacttaatgctgcgataaagaatgaccaaccaagtacaggatatcgtttaattaagccaccaaattgtcttaaatcagcagtgcctgtaattttaatcataattccgataagcaagaataatgcaagttttactaacatgtcgtgcaatgtatagtaaatagcaccaatcatacctgactctgtcatcattgcaacgccgactaagatcacacctacagcaatcatgacattgtataggatgatttttttaatgttggcatatgcaacagcaccgacacaaccaaagatgatcgttaatagtgctaagaataaaatgacataatgtgaaaagcttacattatcactaaagaataggctcaatgttctagcgattgcataaacaccaacttttgttaacaaagcaccaaagaatgcaatgattggaattggtggtgcatagtatgcactaggtaaccaaacaaacattgggaatacgccagcttttgtagcaaaaacaaagataaatagtatgaaaacgatattgactaagccactgtcatgcgctgaaaggttagctaatttattgcttatatctgctagattcaatgttcctactactgaatacaaaatcgctacacccattacgaagaaggatgacgatacaacgttaacaagaacatattttattgtttcttgtagttgaatttttgtagaaccaattactaataagaaataagatgacattaaaaatacttcgaaaaatacgaataggttgaaaatgtcaccagttgtgaatgcaccaatgatacctattaacataaatagtactgaaaaataataataatatctttcacgttcaataccaattgtttggtatgaatataaaatcacaatagctgtaataataatactagtaataattagtagggcactgaatatgtctaaaacaaagacaatactgtaaggcgctttccatgaacctagttcaactcgtaatggtccatgttttacaacatttgctaaattgataattgccgcgaccaaggttaataatgtaccgcctagtgcgacataacgctttataataggacgttttccaataaagacaagtaatatggctgtaattactggaatgacgagcgttaacacaagcatattactttcaatcatcttctggaactcctttcatactctcaacgttatctgtgcctaattctttatatgttctaaatgctaatactaagaaaaaggctgttgtcgcaaaggcgataacgattgctgttaaaataagtgcttgcgggataggatcaacatagctttttacgttcgcttcataaattggaacagtaccatgtttaagtccgcccatagttattaaaaataaatttgctgcatgtgttaatagcgtagttcccataacaattcgtatcagacttttagacaaaacgagatagacactaattgctgtgagaataccactaacaaaaatcataataatttccactattcgttctctccaatcgaaataataattgtcatgacagtaccaactactgcacataaaacaccgaaatcaaagaatactgctgttgtcatatgaacaggttctaatataaataacggtatatcaaatgtgacatgcgtaaagaaatttttgcctaaaaaccaacttgcaataggcgtcgcaatacaaaaaactaatccgatacctatcaagattttaaaatctaatgggaaaattttacgcattgtttctatatcaaatgcaatcgtaatgataacaagtgaacttgcgaataataatccgccgacgaaaccgccaccaggtgtataatgtcctgctaagaaaagtgaaaaaccaaagaccattaccatgaaaaagataataactgcagcaaattgcaaaattagatcattttgttgtctattcatgatttttcacctcgttaccttgcgtttgacgctttttacgtaatttaatcattgtatatacagctaatcctgcgataccaagcacagatgactcgaataaagtatccataccacggaaatcaactagtataacgtttaccatgtttttaccgtgagctaaatcataaacgtgctcttgataaaacttagaaatcgattcaaaatgtctatttccgtatgcaattaaaccgataataatgacggacaaaccaacaccaccagcaattaaagcattagtaagctggaatgagcgcttttcattataacgatttaaatttggtaagtgatagaagcataataagaacaatgctgttgaaatagattcaacgacaaactgtgtcaatgctaagtcgggtgctttaaagaatataaacaatacagacacagcatatccaactgcacttaacataatgatgctaaataatcttgatttagcgaaaagaattaaaaaggcagcacttaataataaaattacgatacaaacttcgaaaattctaatcggactaacgtctttaaaattaatgttgaaaggtactgagaatacagtgacaaatgttaataaaattaatgcaccaaaaatgataactaaattattacgtgaataatcggtaacatagctattcgtcatcttttcagagtagtttggaataacatttgcacttctgttgtaccaataattgaatgttagtttaccaggttgtcgttgcaacaatttcacccaataactaaatgtcacaattagtaagatacctaaaatataaatcactaatgttgataaaaaggcaggcgttaatccatggaacatatggaattcaacatcatcaattaccgtatgattaatcgaagatgtagctggttcaataatcgaattagttaaaatgccagggaataaaccaaatacaattactaatgtagctaaaatagctggtgataaaagcattaatattgatacttcgtgtgcttttttaggtaattgttcaggtttatattgtccgaaaaatatatgcattataaatttaattgaatatacaaatgtgaagacactgcccactataccaatgattgggaataggtagcctaatgtatcaacactgaataaatttgctttgcttgctgtaaatgttgtttctaaaaatgattcttttgataagaaaccattgaacggtggtacaccagccatacttaatgctgtaataacagtgattgtaaatgaaataggcataattgttagtaagccacctaatttcttaacatcacgtgtaccagtagaatgatccactgcaccagtaatcataaatagggcacctttaaatgttgcatggttgattaaatggaatattgcagccgtgaatgcagcagcatatattttgctatcatcgccttgatagtgataactaatggcaccgattccaagcatcgccataatcatacctaattgggatactgttgaaaatgccagtatacctttcaagtcttgttgttttgttgcgtttagcgaagcccagaataacgtaattaaaccaacaagtgtgacagtccatatccaaccttgcgatgctgcgaagattggtgtcattcgagcgattaaatataaccctgctttaaccattgttgctgaatgaagataagcactgactggtgtaggtgcttccattgcatctggtagccaaatataaaatggaaactgagcagattttgtaaaagcaccaatcatgattaaaatcatcgcaaaaatgaagaatgggctattttgaatttcagaagcatgttgaatcatgtactgaatgctaaatgattgtgttggtatagcgagtaagatgataccacctaataatgatagaccaccaaatactgtgattataagcgatttttgagcaccatatatagatgcttgtcgttcgcgccagaatgaaataagtaaaaaactagaaaatgacgttagctcccagaataaatatagaataataacattatctgaaagtacgacacctaacattgcacccataaatagtaataaataacaataaaaattccctagttgttctgacttacttaagtagccgattgaatataatactactaaactgccgattcctgaaataagcaaactaaagagtaaacctaagccatcaagatataaatcaaagttcataccaaaatgaggcatccaatttaaggttttcattacagtattacctgacatcgtcgttttaattaatgtaagcatataaataaatatgacgatagggacaggtaatacgaaccatcctaaatgtatacgtttaaaaaatctatacaggataggaataatgagtgcgaatattaacggtaatatcaccgcaatatgtaacaaactcactatgttgtcctcctttaaaaaatatttatgttattcattatacatgaatgatatagttctgaaaaacgtacacactccttgttgtgctttattttcagaagtatttaaataagaagaaacacgtcattttttatttaaaattttctttgtattgaagtgaataatcttcttttaagcgtgctaaactagctaaagacatttcagcatgttttgtttgctgagctttaagtttagtttctaaatctgtaattgcttgttgaagtgaatcttcatagcgcaatacatcaacattgaagtcgcgtaattgtgaacgtttcgtatagcgtttttcaaaatgacttaatgctttgcgttcatggaaaaatacaccttcagtttcagtagggttatgtaaatcaccttgtttcgggtgtttgataacttgttcaactttaacaaggacatcgtctccattttcttcaacaatcgtgacaccatagctacctgttttgtgtgaaaatcgatatagcttcatgctattttcctcccttaaaagtatgttaatatatatgtatcataacatgaatggagaatataaatggctaactatccacagttaaacaaagaagtacaacaaggtgaaattaaagtggttatgcacacaaataaaggtgacatgacattcaaattatttccaaatattgcaccaaaaacagttgaaaattttgtgacacatgcaaaaaatggttattatgatggaataacattccaccgtgtcattaatgacttcatgattcaaggtggcgatccaacagctactggtatgggtggcgaaagtatttatggcggtgcttttgaagatgaattttcgttaaatgcatttaacttatatggcgcattatcaatggctaactcaggacctaatacaaatggttcacaatttttcattgttcaaatgaaagaagtacctcaaaatatgttaagtcaacttgcagatggtggctggcctcaaccaatcgttgatgcatatggcgaaaagggtggtacaccatggttagatcaaaaacatacagtattcggtcaaatcattgatggtgaaactactttagaagatattgcaaatacaaaagtgggaccacaagacaaaccacttcatgatgttgtaattgaatctattgatgttgaagaataatatctaaacataattaactgccaacattttaaactcggataaagctaatttatgaatggattagtatatattccaacgaaaacaaataaactaatatgatgagcaatctcaatatatttatcaagaaagcacagtttttaaatagatgtgtattctagagataatagttgaggttgctttttatgttttacagagaattgctattcaaatagttaataaattgaaaacaaagtagctggatatcatattgatttagataggaatttgttgctgattttatttgtaaatccaagtttgtagtattcttattcatttataaaataatattcgtatgatttgatgttttaattagtccaccatttcgatttgtgctatgataatagtgttaagtaaacgaaataaggggttattaagttgaataactacaaaattggccaacatatcaaggtgcgtgtaactggtattcaaccatacggtgcgtttgttgagacccctaatcatactgaaggactgattcatatatcagaaattatggatgactacgttcataatttgaagaaatttctatcagaaggccaaattgttaaagctaaaattttgtctatagatgatgaaggaaagctcaatctatcattaaaggataatgattacttcaaaaattatgagcgtaagaaggaaaaacaatcagtattagatgaaatcagagaaacagaaaaatatgggtttcaaacacttaaagaacgcttaccaatctggataaaacagtcaaagcgagcaattcgaaacgactaaaggaacagataaatcgtaccgaaaatcatacaaagggtctgaaatgaaagtttcttagactataaaagagattagtatctattaaattatattagatactaatctctttttgtctgcgttaacgtaatatgattgattctatttacacgtacaaatggtttaaggtgacatatccattatctttattagatagaatcgttgatttgcaatgatgtatgtggatttgtttttttaatttattttagaaatgagaactacaacttaaagtattaaacgaattgcaactatataaacagataattggagaatgaaaaaattacatgttatagtcaactcaataattttaaggaggaattaagtaatgaaaagtaaatacgaaccattgtttgataaagtagtattaccaaatggagtagagttgagaaatcgatttgtgttagcccctttaacacatatttcttcaaatgatgatggtactatttcagatatagaacttccttatattgaaaagcgttcacaagatgttggtattacaagtaatgctgcgagtaatgtgagtgatgtcggaaaagcatttccaggacagccgtcaatcgcgcatgacagtgatattgaaggactaaaacgattagctacagcaatgaagaaaaatggtgccaaagcactcgtacaaatacatcatggcggtgcacaagcattgcctgaattaacacctgatggagacgtcgtagcaccaagtccaatttctttaaaaagtttcggtcagaaacaagaacatagtgctagagaaatgacgaatgaagagattgaacaagcaatcaaggattttggtgaagcaacgcgacgtgcaattgaagcagggtttgatggtgttgaaattcatggcgcgaatcattacttaattcatcaatttgtatcaccatactataatagaagaaatgatgtatgggcaaatcaatataaattcccgatcgctgtgattgaagaagtgcttaaagcgaaagaagtgtatggtaataaagactttatagttggatacagattatctccagaggaagcggagtctccaggaatcacaatggaaattacagaggaactcgttaataaaattagccatatgccaatcgactatattcatgtttcaatgatggatacgcatgcaacggcacgtgaaggtaaatacgctggacaagaaagactgcctttaattcacaaatggataaatggtcgtatgccacttatcggtattggttcaattttcacagctgacgacgctttagatgcagttgaaaatgttggtgttgacttagtagccattggtagagagctactactagattatcaatttgttgaaaaaattaaagatggacgggaagatgaaattattaattactttgatccagagagagaagataatcatcacttaactcctaatttatggcatcaatttaatgaagggttctatccattaccacgtaaagataaataagtgtttgactgttaccactaatgatattgtgtatgcaatttgttagtggttttcaatatttataaataaaaatattcttagtaaaatatacttttgattaagtgtaaaattatcaattcttttgcttgtaatcatttaagtaattatgtcattataaatgtaagggttttcaaaatagacaaatttaatgaaacttagtgattaattcatcttttcgggtgaaaaagtatctgctttgaaaactaatgtaattatttggataatgtttcatgtataatagttataaatgatgaaaaggggagatatgatgactaaatctgaaaaaattattgagttaacaaatcattacggagcacataattatttaccattgccaattgtcatttcagaagctgaaggggtatgggttaaagatcctgaaggcaataaatatatggatatgttatctgcatattccgctgttaaccaaggtcatagacatccgaaaattattcaagcattaaaagatcaagctgataaagtgactctagtttcacgtgcttttcatagtgataacttaggagaatggtacgaaaaaatttgtaaactggcaggtaaagataaagctttaccaatgaatacaggtgctgaagcagtagaaacagctttgaaagcagcacgacgctgggcatacgatgttaaaggaattgagccaaataaagcagaaatcattgcatttaatggtaacttccatggtcgaacaatggcgccagtttcattatcatcagaagcagaataccaacgtggttatggtccattattagatgggtttagaaaagttgattttggtgatgtagatgcattgaaagctgcaattaataaaaatactgcagcagttttagtagaaccaattcaaggtgaagcgggtataaatataccaccagaaggatatttgaaagcaattagagaattatgtgatgaacataatgtcttatttattgctgacgaaatccaagcaggattaggtcgttcgggtaaattatttgctacggattgggataatgtaaaacctgatgtctatattttaggtaaagcactaggtggtggtgtcttcccaatttctgttgtattagcagataaagaagtattagatgtctttacacctggctcacatggttcaacatttggtggtaatccacttgcttgtgcagcatcaattgctgcattagatgttatcgttgatgaggatttaccaggtcgctctttagaattaggagattattttaaagaacaattaaagcaaattgatcatccatcaattaaagaagtccgtggacgtggtttgtttataggtgtggaacttaatgaaagtgctagaccatactgtgaagcattaaaagaagaaggcttattatgtaaagaaacgcatgatactgtcattcgttttgcaccaccattaattattactaaagaagaattggaccttgcacttgaaaaaataagacatgtatttcaataatgtcaaaaagttgtaacaatcagtttgtaagggctttaaaaaggaatacgttatgttacaatatgtttgaaagcgaaatcattaggtaaagaagaggcgaaaaggatcatgactgagaacaataatttagtaacttctactcaaggaattattaaagaagcattgcataaattgggatttgacgaaggaatgtacgatttaattaaagaacctttaagaatgttacaagtgcgtatccctgtacgaatggatgatggcactgttaaaacattcacaggttaccgtgcgcaacataatgatgctgttggaccaacaaaagggggcgtgcgtttccacccagatgttgatgaagaagaagtaaaagcattatcaatgtggatgactttgaaatgtggcattgttaacttaccatacggtggtggtaagggtggtatcgtttgtgatccacgtcaaatgagcattcatgaagttgaacgtttatcacgcggatatgtaagagcaatttcacaattcgtaggtccgaacaaagatattccagcaccagatgtatttacaaactcacaaattatggcttggatgatggatgaatatagtgcattagataaatttaattcaccaggtttcatcacaggtaaaccaattgtattgggtggttctcatggacgcgatagatcaactgcactaggtgtagttattgcaattgaacaagctgcaaaacgtcgtaatatgcaaattgaaggtgccaaggttgttattcaaggtttcggtaatgccggaagtttcttagctaaattcttatatgatttaggtgcaaaaattgtaggtatctctgatgcttacggtgcattacacgatccaaatggcttagatatagattatttattagaccgtcgtgatagttttggtacggtaacaaatttatttgaagaaacaatctcaaataaagaattgtttgaattagattgtgacattttagtaccagcggctatttcaaaccaaattacagaagacaatgcacatgatattaaagctagcatcgttgttgaagctgctaatggacctacaacaccagaggcaacacgtattttaactgaacgtggtatattattagttccagacgtattagcaagtgctggtggtgtaacggtttcatacttcgaatgggtacaaaataatcaaggttattattggtctgaagaagaagttaatgaaaagctacgtgaaaaattagaagcggcatttgatacgatttacgaattgtctcaaaatcgaaaaatagatatgagacttgcagcatatatcataggtattaaacgtacagcagaagcagctagatatcgtggttgggcataattaattatcatatgtgatttaacgagcttgggacagaaaacaaagccctaagctcgttaattatattttagcagtagttgactgaataaaaatacacttgtaacaagcttatttcaaaaatagccggggccccagcacagaagctggcgaaaagtcagcttacaataatgtgcaagttggcggggccccaacacagaagctggtggaaagccagcttacaataatgtgcaagttggggtgggcccccaacacagagaatttctaattaaacgctcaactatatatagttgagcaaaaagacagcagtaggataatttcaatttggaaatatcttactgctgttttttatagtaatagctatatttttgtatttatgttttctagtttaacaatactatttaatgacttctttatatttatcagcgaaatttgtaaagacaccatcaacgccgtatttatttaatcgtaacatatcagctttttcattcactgtataaggatgtactataaatcctaagtcttttaaatgatgggtattttgttcagttaaatctgtataatcaggacctaatccaatcgcataagagcgtatctcttttaagcgttggtcgttaaattgttgtagttcacctttatcaactaattttactaatggcacatgcttattttgacgatgaattttctttaaactttcgtcagaaaatgattgaatcattacatgtccattttttaatttatttttatttaaaaggtgatgctttttcaatgaagctaataattgttcttccattcctgggtatacatcaggtgactttgtttcaatataatagtttgcatttggaccataacgttctaaaatttcatctaaagtgggtactttagcatttttataacttgctcttgcgtattttggatattttttattaaaccaacttcctgcatctaactgttttaattcatcaagggtataatcctcaactttaccgtgtccatttgttgtacggttaacattttcatcatgcatagcaactaaatggccatctttggtacgttgtaaatcaatttcgatatacgatgcttttaactcattatgactcttatcatatgcttgaaacgtatgctcgggtgcatagccacttgcgccacgatgtgcgatagtagtgaatcgctcattcgttaaatttgtatgccattgaatagcctgaggtttatttgcaatatgattagtttgttcagcgccagcagtaggtactgataaaaatcccatagtaaaaacagcagaagcagccataaatttagtgaagcttttcgaagagttagtcatagtctttatcctttcatctctttatttgtagtctaacaattttaaaatactacaaaaacctgcttgtgaaaacgctttacacatttcttttacaatttataacatttctgtaatataaatttaaaagaattatcaaacattttaggaatcttaaaaatgtgatgttcaacaagacgaagagagcattaaaatacccacaatgtaattttcatagacattgtgggtaggtagattaacgtatttattgtgatagtaattgtttagcaacatcaagttgttgtttgaccgatgattgacccgtagaaccgtaactttgacgtcgttttaagcaattttcaggctgcaaataatcgtaaatatcggcatcgatactagaatgatgttgttgatatgttgataaaggaacatctaataaataatgaccttgttgtatacattctaagacgatttttcctacaatttcatgtgcagttctaaatggaatatttttagttactaaataatctgctagttccgttgcatttgaaaaatcttctttaacagtttgattgagtcgttctttattaatggtcatcgtttgaatcataccttcgaaaatacgtaaagaacctttaattgtatggacagcatcgaataaaccttctttatcttcctgcatatctttgttatatgctagaggtaatccttttaaagtcataagcatgctcattaaatgaccagtcgttcgaccaactttacctctaattaattctgccatatcaggatttttcttttgtggcataatagatgagccagtagaaaatgcatctgataatgtaatgaatttagcttcgtctgtggaccagaaaataatttcctctgcaaaacgtgataagtgaaccatcgttaaagaaatattatgcaatgtttcaataatatagtctctgtcactaacagcatctaggctattctcatagaggctgccaaagttcaacaatgctgttgtctcgtgtctatcgatagggtatgtggtaccacttaaggctgctgcacctaaaggattaatatcgattcgttttaaactatcttcaaatcgttgttggtctcgttgtaacatccaaaaataagtcataatatgatgtgcaaatgaaattggctgtgcacgctgtaaatgagtataaccaggcataattgtatcaacattattggaagcgatgtctacaattacactttgtaacgacttaattaatgcgatgatatcttgcacttgtttcttagtgtacaagtgcatgtctgttgcaacttgatcgtttctactgcgtccagtatgcaacttaccaccagcatcaccaatacgtttaattaattcatgttcaatatttaaatgaatatcttctaatgatgcactaaattgaatttgatcttgatgataatcatgttgaatagattttagtccttgtataatttgttcgctgtcttgttgactaataatgccttgattcgcaagcatagttgcatgcgcaatgctgccttcgatatcttgatctatgagcgtttgatcaaaagtaatggatgcgttaaagtcgtcaacccactcttcaggttgtacttcaaatctaccgccccaagctttattgctcattgctatagcctccatgtaacatcgcatttacttgagtaggtaaaccatagatatcgataaagccaacagcagcgtcttgattaaatgcatcttcttttgtataagttgctaatttttcatcatataatgtgtaaggtgattttctaccattcacgatagcattacctttgaataatttaattctgacatcaccacttacgtattgctgagtactatcaataaataatttcaagctatcagttaaaggtgagaaccaaagtccattgtatagttgttcagcaaattgcttctcaatgattggtttaaagtgtgcaacatctttcgttaacgtaatcgtttctaatgctttatgtgcttttaaaataacttctgcagcaggtgcttcataaatttctcttgatttgatacctacaagtctattttctacatggtcaattcttccgataccatgcttaccagctaatgcattcaacgttaaaattaaatcgtctaattcatatgttttgccatcaatttgaactgggatgcctttatcaaacgttaaaatgatttcatcagcagtatctggtgtttcttctaaagcatttgttagatcgaacgcatcctctggtggtgcagcataaggatcttctaaaataccacattcattcgctctgccccataggttttgatcgatagaataaggtgaatcatggttaattgatacagggatattatgtttaattgcataatcaatttcttcttcacgactccatgcccactcacgtacaggtgcgaatgctttcaatgatgggtttaatgctttaatggcaacttcgaaacgtacttggtcattccctttaccagtacaaccatgtgcaatacctactgaatttgttttctcagcaatctctactaattttttagcgattaatggtcttgataaagcagaaactaatggatatgcattttcatacattaaatttcctttgattgcataacttacatactcatcactaaattcttttgttgcatcaataatatgacattcaacagctcgcatatctaaagcttttttataaacgatgtctaaatctttaccttcaccaacatctaggcaacaagctacaacgtcgtatcctttgtcgataagccattgaacggccacacttgtatctagtcctcctgaatatgctaaaacaattttctctttcataaaattcacctcattgtagttatctgaatatttcgtatgaacacatgatagcaaacttttaatgaaaataaaaccattattttacatatttattcataaaatatgatagaggtagttagagttgtaagtataaatacttatttatcaatgtttaaaagtgttttaaaaaacatgcaaattgtataaaaaatgtttgagtgtttgacgccggtttgaaatgtttgttgaaaaataggtgtgaaacgtcacataaatatcaattttattgattaagtacaaacttgtgaattgaatcgcaaacgtaaacttagtaaaattaagatattaaatgaaacaggaggcttttatagatgactcatattcaattagattttagtaaaacgttagaatttttcggtgaacacgaattaaaacaacaacaagaaattgttaaatcaattcacaaaacaattcatgaaggtactggtgcaggtagtgacttcttaggctgggttgatttaccagttgattacgacaaagaagaattttcaagaattgttgaagcatcaaaacgcattaaagaaaattctgatgttttagtagtcatcggtattggtggttcttacttaggtgcacgtgcagcaatcgaaatgttaacgtcatcatttagaaacagcaatgaataccctgaaattgtatttgttggtaatcacttatcatcaacatacactaaagagttagttgattatttagcagacaaagatttctctgtaaacgttatttctaaatctggtacaactacagaaccagcagttgcatttagattgttcaaacaattagttgaagaaagatacggtaaagaagaagcacaaaaacgtatatttgcaacaacggataaagaaaaaggtgctttaaaacagttggctacaaacgaaggttatgaaacgtttatcgtacctgatgatgtaggtggaagatattctgttttaacagcagtaggattattaccaattgcaacagctggaattaacatcgaagctatgatgattggtgctgcaaaagcacgtgaagaattatcttcagataaattagaagaaaacattgcataccaatatgcgacaattcgaaacattttatatgcaaaaggttatacaacagaaatgttgattaactatgaaccatctatgcaatactttaatgaatggtggaaacaattatttggtgaatcagaaggtaaagacttcaaaggtatttatccttcaagtgccaactacacaactgatttacattctttaggtcaatatgtacaagaaggccgtcgtttcttattcgaaacagttgtaaaagtaaatcatcctaaatatgatattactattgaaaaagatagtgatgatctagacggattaaattatttagctggtaaaacaatcgatgaagttaacacaaaagcattcgaaggtacattattagcgcatactgatggtggtgttcctaacatggtagtgaacattccacaattagatgaagaaactttcggttatgtcgtatacttcttcgaacttgcttgtgcaatgagtggataccaattaggcgtaaatccatttaaccaacctggtgtagaagcatataaacaaaacatgttcgcattattaggtaaacctggttttgaagacttgaaaaaagaattagaagaacgtttataaaatacattacttcaatgattagtgaagtttgaaaagatagaactagacgttaactatttaaagcatatttccgaggttgtcattacaaatgtaaaaatgtaatgacaacctcgtttttattttatatgcaagatataggttactagctaatgtgacaagatgttaagagaaaattaaagagaaaataatatctgccatacaataaaattgttatactactagagactgatttattagcatgattacatgttaatgtttctttacttagtaattaactttataatgtaagaataattatcttcagccaaagaaagggattgatgatttgtcgtttcatcaagtagaagaatggtttgagatatttcgacagtttggttatttacctggattcatattgttatatataagagcgattattccagtatttccattagcactctatattttaattaatattcaagcctatggacctattttaggtatattgattagttggcttggattaatttctggaacatttacagtctatttgatctgtaaacgattggtggatactgaaaggatgcagcgaattaaacaacgtactgctgttcaacgcttgattagttttattgatcgccaaggattaatcccattatttattttactttgttttccttttacgccaaatacattaataaattttgtagcgagtctatctcatattagacctaaatattatttcattgttttggcatcatcaaagttagtttcaacaattattttaggttatttaggaaaggaaattactacaattttaacgcatcctttaagagggatattaatgttagttgtgttgattgtattttggattgttggaaaaaagttagaacagcattttatggggtcgaaaaaggagtgacatcgtgaaaaaagttgtaaaatatttgatttcattgatacttgctattatcattgtactgttcgtacaaacttttgtaatagttggtcatgtcattccgaataatgatatgtcaccaacccttaacaaaggggatcgtgttattgtaaataaaattaaagttacatttaatcaattgaataatggtgatatcattacatataggcgtggtaacgagatatatactagtcgaattattgccaagcctggtcaatcaatggcgtttcgtcagggacaattataccgtgatgaccgaccggttgacgcatcttatgccaagaacagaaaaattaaagattttagtttgcgcaattttaaagaattagatggagatattataccgcctaacaattttgttgtgctaaatgatcatgataacaatcagcatgattctagacaatttggtttaattgataaaaaggatattattggtaatataagtttgagatattatcctttttcaaaatggacgattcagttcaaatcttaaaaagaggtgtcaaaattgaaaaaagaattattggaatggattatttcaattgcagtcgcttttgtcattttatttatagtaggtaaatttattgttacaccatatacaattaaaggtgaatcaatggatccaactttgaaagatggcgagcgagtagctgtaaacattattggatataaaacaggtggtttggaaaaaggtaatgtagttgtcttccatgcaaacaaaaatgatgactatgttaaacgtgtcatcggtgttcctggtgataaagtagaatataaaaatgatacattatatgtcaatggcaaaaaacaagatgaaccatatttaaactacaatttaaaacataaacaaggtgattacattactgggactttccaagttaaagatttaccgaatgcgaaccctaaatcaaatgtaattccaaaaggtaaatatttagtgcttggggataatcgtgaagtaagtaaagatagccgtgcgtttggcctcattgatgaagaccaaattgttggtaaagtttcgtttagattctggccattcagcgaatttaaatataatttcaatcctgaaaatactaaaaattaatatgaaacaaatacaacatcgtttgtcggttttaatactgataaacgatgttttattttgtaataggtatgataaaagctaagttcgaaatgaacttataataaatcaatcacaatcactttgtgttaaaatatgtgtcaaaggaagtgagggtttgtcatgacattacatgcttatttaggtagagcgggaacaggtaagtctacgaaaatgttgaccgaaataaaacaaaaaatgaaagcagatccgcttggagatccaatcattttaattgcgccaactcaaagtacatttcaattagaacaagcctttgtcaatgatccggaattaaatggtagtttaagaacagaagtgttgcattttgaacgattaagtcatcgtattttccaagaagttggtagttatagcgaacaaaagttatctaaagctgcaacggaaatgatgatttataacattgttcaagaacaacaaaagtatttaaaactttatcaatcacaagcaaaatattatggatttagtgaaaaattaacagaacaaattcaagattttaaaaaatatgcagtaacgcctgaacatttagaaagctttattgctgataaaaatatgcaaactcgaactaaaaataagttagaggatattgctttaatataccgagagttcgaacaacgcattcaaaacgagtttattacgggtgaggatgcattacaatattttattgattgtatgccgaaatcagagtggctaaaacgtgctgatatatatattgatggttttcacaacttttcaacgattgagtatttaataatcaaaggattaattaaatatgcgaagagtgtcacaattatattgacgacagatggtaaccacgatcaattcagtttatttagaaaaccatcggaagtgttacgacatattgaagaaatatcaaatgaactcaatatttctattgaacgtcaatatttcaaccaattatatcgctttaataatcaagatttaaagcatcttgaacaagaatttgatgcacttcaaatcaatcgagtggcatgtcaaggtcatatcaatattttagaatctgcgactatgagagaggaaataaatgaaattgcacgacgtatcatcgttgatattcgtgataaacaattacgatatcaagatattgctattttatatcgtgacgagtcttatgcttatttatttgattccatattaccgctttataatattccttataacattgatacaaagcgttcgatgacacatcatccggtcatggaaatgattcgttcattgattgaagttattcaatcaaattggcaaattaatccaatgctacgcttattgaagactgatgtgttaacgacatcatatctaaaaagtgcatacttagttgatttacttgaaaattttgtacttgaacgtggtatatacggtaaacgttggttagatgatgagctatttaatgtcgaacattttagcaaaatggggcgtaaagcgcataaacttaccgaagatgaacgtaacacatttgaacaagtcgttaagttaaagaaagatgtcattgataaaattttacattttgaaaagcaaatgtcacaagcagcaactgtaaaagactttgcaactgctttttatgaaagtatggaatattttgaactgccaaatcaattgatgacagagcgagatgaacttgatttaaatggtaatcatgaaaaggcggaagaaattgatcaaatatggaatggcttaattcaaatcctcgatgacttagttctagtatttggagatgaaccaatgtcgatggaacgtttcttagaagtatttgatattggtttagaacaattagaatttgttatgattccgcaaacattggaccaagttagtattggtacgatggatttggctaaagtcgacaataagcaacatgtttacttagttggaatgaatgatggtacgatgccacaaccagtaactgcgtcaagcttgattacagatgaagaaaagaaatactttgaacagcaggctaatgtcgagttaagtccaacatcagatattttacagatggatgaagcatttgtttgttatgttgctatgactagagctaagggaaatgttacattttcttatagtctaatgggatcaagtggtgatgataaggaaatcagcccatttttaaatcaaattcaatcattgttcaaccaattggaaattactaacattcctcaataccatgaagttaacccattgtcactaatgcaacatgctaagcaaaccaaaattacattatttgaagcattgcgtgcttggttagatgatgaaattgtggctgatagttggttagatgcttatcaagtaattagagatagcgatcatttaagtcaaggtttagattatttaatgtcagcattaacgtttgacaatgaaactgtaaaattaggtgaaacgttgtctaaagatttatatggtaaggaaatcaatgccagtgtatctcgatttgaaggttatcaacaatgcccatttaaacactatgcctcacatggtctgaaactaaatgagcgaacgaagtatgaacttcaaaactttgatttaggcgatattttccattccgttttaaaatatatatctgaacgtattaatggtgattttaaacaattagacctgaaaaaaataagacaattaacaaatgaagcattggaagaaattttacctaaagttcaatttaatttattaaattcttcagcttactatcgttatttatcaagacgcattggcgctattgtagaaacaacactaagcgcattaaaatatcaaggcacgtattcaaagtttatgccaaaacattttgagacaagttttagaaggaaaccaagaacaaatgacgaattaattgcacaaacattaacgacaactcaaggtattccaattaatattagagggcaaattgaccgtatcgatacgtatacaaagaatgatacaagttttgttaatatcattgactataaatcctctgaaggtagtgcgacacttgatttaacgaaagtatattatggtatgcaaatgcagatgatgacatacatggatatcgttttacaaaataaacaacgccttggattaacagatattgtgaaaccaggtggtttattatacttccatgtacatgaacctagaattaaatttaaatcttgggcagatattgatgaagataaattagaacaagatttaattaaaaagtttaagctgagtggtttagtgaatgcagaccaaactgttattgatgcattggatattcgtttagaacctaaattcacttcagatattgtaccagttggtttgaataaagatggttctttgagtaaacgaggcagccaagttgcagatgaagcaacgatttataaattcatccaacataacaaagaaaattttatagaaaccgcttcaaatattatggatggacatactgaagttgcaccattaaagtacaaacaaaaattgccatgtgctttttgtagttatcaatcggtatgtcatgtagatggcatgattgatagtaagcgatatcgaactgtagatgaaacaataaatccaattgaagcaattcaaaatattaacattaatgatgaatttgggggtgagcaatagatgacaattccagagaaaccacaaggcgtgatttggactgacgcgcaatggcaaagtatttacgaaactggacaagatgtacttgttgcagccgcggcaggttcaggtaaaacagctgtactagttgagcgtattatccaaaagattttacgtgatggcattgatgtcgatcgacttttagtcgtaacgttcacaaacttaagtgcacgtgaaatgaagcatcgtgtagaccaacgtattcaagaggcatcgattgctgatcctgcaaatgcacacttgaaaaaccaacgcatcaaaattcatcaagcacaaatatctacacttcatagtttttgcttgaaattaattcaacagcattatgatgtattaaatattgacccgaactttagaacaagcagtgaagctgaaaatattttattattagaacaaacgatagatgaggtcatagaacaacattacgatatccttgatcctgcttttattgaattaacagagcaattgtcttcagatagaagtgatgatcagtttcgaatgattattaaacaattgtatttctttagcgttgcaaatccaaatcctacaaattggttggatcaattggtgacaccatacgaagaagaagcacaacaagcgcaacttattcaactactaacagacttatctaaagtatttatcacagctgcctatgatgctttaaataaggcgtatgatttgtttagtatgatggatggcgtcgataaacatttagctgttatagaagatgaacgacgtttaatggggcgtgttttagaaggtggctttattgatatatcttatttaactggtcacgaatttggtgcgcgtttgcctaatgtaacagcgaaaattaaagaagcaaatgaaatgatggtcgatgccttagaagatgctaaacttcagtataaaaaatataaatcattaattgataaagtgaaaagtgattacttttcaagagaagctgatgatttgaaagctgatatgcaacaattggcgccacgagtaaagtaccttgcgcgtattgtgaaagatgttatgtcagaattcaatcgaaaaaagcgtagcaaaaatattctggatttttctgattatgaacattttacattacaaattttaactaatgaggatggttcgccttcagaaattgccgaatcataccgtcaacattttcatgaaatattggtcgatgagtatcaagatacgaaccgagttcaagagaaaatactatcttgcatcaaaacgggtgatgaacataatggtaatttatttatggttggagatgttaagcagtccatttataaatttagacaagctgatccaagtttatttattgaaaagtatcaacggtttactttagatggagatggcactgggcgtcgaattgatttgtcgcaaaacttccgttctcgtaaagaagtactgtcaacgacaaactatatattcaaacatatgatggatgaacaagtcggtgaagtaagatatgatgaagcagcacagttgtattatggtgcaccatatgatgaatcggaccatccagtaaacttaaaagtgcttgttgaagcggatcaagaacatagtgatttaactggtagtgaacaagaagcgcattttatagtagaacaagttaaagatatcttagaacatcaaaaagtttttgatatgaaaacaggaagctatagaagtgcgacatacaaggatatcgttattctagaacgcagctttggacaagctcgcaatttacaacaagcctttaaaaatgaagatattccattccatgttaatagtcgtgaaggatactttgaacaaacagaagtccgtttagtattatcatttttaagagcgatagataatccattacaagatatttatttagttgggttaatgcgttccgttatttatcagttcaaagaagatgaattagctcaaattagaatattgagtccgaatgatgactacttctatcaatcgattgtaaattacattaatgacgaagcagcagatgctattttagttgataaattaaaaatgtttttatcagatattcaaagttaccaacaatatagtaaagatcatccggtgtatcagttaattgataaattttataatgatcattatgttattcaatactttagtggacttattggtggacgtggacgacgtgcaaatctttatggtttatttaataaagctatcgagtttgagaattcaagttttagaggtttatatcaatttattcgttttatcgatgaattgattgaaagaggcaaagattttggtgaggaaaatgtagttggtccaaacgataatgtcgttagaatgatgacaattcatagtagtaaaggtctagagtttccatttgtcatttattctggattgtcaaaagattttaataaacgtgatttgaaacaaccagttattttaaatcagcaatttggtctcggaatggattattttgatgtggataaagaaatggcatttccatctttagcttcggttgcatataaagctgttgccgaaaaagaacttgtgtcagaagaaatgcgattagtctatgtagcattaacaagagcgaaagaacaactttatttaattggtagagtgaaaaatgataaatcattactagaactagagcaattgtctatttctggtgagcacattgctgtcaatgaacgattaacttcaccaaatccgttccatcttatttatagtattttatctaaacatcaatctgcgtcaattccagatgatttaaaatttgaaaaagatatagcacaaattgaagatagtagtcgtccgaatgtaaatatttcaattatatactttgaagatgtgtctacagaaaccattttagataatgatgaatatcgttcggttaatcaattagaaactatgcaaaatggtaatgaagatgttaaagcacaaattaaacaccaacttgattatcaatatccatatgtaaatgatactaaaaagccctcaaaacaatctgtttctgaattgaaaagacaatatgaaactgaagaaagtggcacaagttacgaacgagtaaggcaatatcgtatcggtttttcaacgtatgaacgacctaaatttctaagtgaacaaggtaaacgaaaagcgaatgaaattggtacgttaatgcatacagtgatgcaacatttaccattcaaaaaagaacgcatatctgaagttgagttacatcagtatatcgatggattaatcgataaacatattatcgaagcagatacgaaaaaagatatccgtatggatgaaataatgacatttatcaatagtgagttatattcgattattgctgaagcagagcaagtttatcgtgaattaccgtttgtagttaaccaagcattagttgaccaattgccacaaggagacgaagacgtctcaattattcaaggtatgattgacttaatctttgttaaagatggtgtgcattattttgtagactataaaaccgatgcatttaatcgtcgccgtgggatgacagatgaagaaattggtacacaattaaaaaataaatataagatacagatgaaatattatcaaaatacgcttcaaacgattcttaataaagaagttaaaggttatttatacttcttcaaatttggtacattgcaactgtagtattttgattttcaaaagaataaaaaataatttcgattaagtgcaaagtccttgtagcagaatgaacacaactcattttcaaaattgtcttacttatttatttgttatttgataacgaaaaaagttataatgtgaattaagataaagatgaggagttgagaatgaatgaaattcttatcattcaagtataatgacaaaacttcatatggcgttaaagtaaaacgcgaagatgctgtatgggatttaacacaagtatttgctgactttgcagaaggagatttccatcctaaaacattgttagctggtttacaacaaaatcatactttagattttcaagaacaagtacgtaaagcagttgtagcagcagaagatagcggcaaagctgaagactataaaatttcatttaatgacattgaattcttaccaccagtaacacctccgaataatgtgattgcttttggtagaaattacaaagatcatgcgaacgaattaaatcatgaagtagaaagattatatgtatttacaaaagcagcgtcatctttaacaggagataatgcaacaattccaaatcataaagatattactgatcaattagattatgaaggtgaattaggtattgttattggtaagtctggtgaaaagattccaaaagcattagctttagattatgtttacggctatacaattattaacgatatcactgatcgcaaagcacaaagtgaacaagatcaagcatttttatcaaaaagtttaactggcggttgcccaatgggtccttatatcgttactaaagacgaactaccattacctgaaaatgtaaatattgttacaaaagttaacaacgaaattagacaagatggcaacactggcgaaatgattcttaaaattgatgaattaatagaagaaatttcaaaatatgttgcactacatccgggagatattattgcaactggtacaccagcaggcgttggtgcaggtatgcaaccaccaaaattcttacaaccaggtgatgaagttaaagtgactattgataatattggaacgctgacaacttatatcgctaaataattatcatttaaaaagctaaccagtctttatatagattggttagttttttcttgcttttctaaaaagtgttaaagatcattgtttataatgttaccattttgagacgaaagtgaaatattgatattaagaagtagttgattattttacagtagatgcacagtattctaataagtaataaaatgtcatgttcttcctctaaaatatagaagtgtggtaaaatatatatttgtgtatgaacaaataatgattaaattataagaaagtgggtatttatcccacgaagttttaatttaataactaaaattattaaagtgggggaattaatatgttacatttacattttttaagttgggtattagcaatcattttatttatcgctacatacttaaatatttcaaaaaatcaaggtggtacgccatatttcaaaccattacatatggtgctacgattatttatgctgttgacgttaatttcaggattttggatattaattcagtcatttatgaatggcggggcaaatcatatgttgcttacattgaaaatgctgtgtggtgtagcagtagttggattgatggaagtgtcgattgctaaaagaaagagacatgaacaaagtcacacaatgttttggataacaattgcattaattatcatcacaatggtattaggtgtcattctaccgttagggcctatatcaaaattattcggtattggctaattgataagacatatagtatatgacataaggcatggacaattattagtccaagaccttatgtcttttttgattctaaaaatgtttaaacaaaaaaaatgagtctgggacataaatccctaaaaaaacagcagtaagataattttcaattagaaaatatcttactgctgttctctatttatacaatacttcgtattgaatggcttcgctttcctagggtgccgtctcagccttggtcttcgactggcactgctccctcaggagtctcgccattaatactacgtattaacatgtaattttactttgaaatactttaaaaaaataagacactttcgtataatttaataaataccactaaactaaattaacgaggtgccttatgtataaaaattataacatgacccaacttacactaccaatagaaacttctgttagaattcctcaaaatgatatttcacgatatgttaatgaaattgttgaaacgatacctgatagcgaattcgatgaattcagacatcatcgtggcgcaacatcctatcatccaaaaatgatgttaaaaattatcttatatgcatacactcaatctgtattttctggtcgtagaatagagaaattacttcatgacagtattcgaatgatgtggttagctcaaaatcaaacaccttcttataaaactattaatcgttttagagtaaatcctaatactgatgcattaattgaatctttatttattcagtttcatagtcaatgtttaaagcaaaatcttattgatgataattcaatttttattgatggtgcaaaagtagaagctaatgccaataggtatacatttgtgtggaagaaaagtattcaaaatcacgaatcgaaattgaacgaaaattcaaaagcattatatcgtgacttagttgaagaaaaaataataccagagataaaagaagatggagatagcgatttaacaatagaagaaatagatttaattggtagtcatttagataaagaaatcgaagatttaaatcattctattcagaacgaagattgtactcaaattagaaaacagacccgtaaaaaaagaactgagattaagaagttcaaaaagaaatttgatgattattccgaaagaaaaagtaaatatgaagaacaaaaatcgattcttaaagatagaaatagcttttctaaaactgatcatgatgcaacttttatgagaatgaaggaagaccatatgaaaaatggccaacttaagccaggatacaatttacaaatagcgacaaattctcaatttgttttatcctatgacctatttcaaaacccgacagatactagaactttaattccatttttaacaatgattcaaaataccttcggttatttaccggagtatattgtagctgatgcaggttatggtagtgagcaaaactatatggctattatagatgattttaataaaacgccacttattacgtatggtatgtttattaaagataaaacgagaaagtttaaaagtgccatttttaacactcaaaactggaaatatgacgaacttaatgatgaatttatatgtcctaataacaaaagaataggttttaaaagatatgcataccttaatgatagatatggttttaaacgtgacttcaaactatatgaatgcgatgactattcagcatgttctttgaggcaacaatgcatgaagccaaattcgaaatccaataagaaaagcatgaagaattataattgggaatactttaaagcccaaattaatcaaaagctttctgaaccagaaacgaaaaaaatctatagtcaaagaaaaattgatgtagagcctgtttttggatttatgaaggctattttgggtttcactcgaatgtcagttcgaggaataaataaagttaaacgagagctaggttttgtattaatggcacttaatataaggaaaatagtagctcgacgagctgtatattatcaaatacatttaaaaaaagctgatttctatcaaataattaatagaaatcagcttttttacattgcctaagaacttaatgtcccaagctcaacaaaattctaacctagacaattaagattagattgaatcgcatgattcatttatttagctttgtaaccaatcatattgattaaatctttagggtggctatatggtggtgcataagccacttcaaactcagttaactcatctacagttagctggttcatcattgccatcgatagtacatcaatacgtttatctgcgccttcttttcctactgcagctgctcttaaaatctgacggtttgaagtgtcataatatactcttaagtgtaaaggggaatttcctgggtaataattcgcgtgtgcaccttgagtgacttccaccattttatagtcaaattgctttagttcgtttggtttaacgccgacactcgcaaatgtataatcaaagaacttcacaatattgttgcctaagaagcctttgaattcaatagtgtcatttccagcaatttgttcggcaacaatacttgctgcacggtgagcgccccaagctaaaggaacactagccggtagatcgacatgtcgataatgtgatgttgcaatatcgcctattacataaatgtttggaacatttgtttcaaatttatcgtttaccggtatgaaaccttttcgatcaagtttgatatttgaactttcgataaattttgaattggggtgagtaccgacaccttcaataatcatatcgtaatgttcaacttttcctgatttaaatgtaatttcatttccattgatagcatcaatttcctcatttaaacggtatggaatctcccgcttatctaattcatcaagtataggttgattcatatcggcatccattaatttatttatcttatcagatcgatgaattaaagtagggtgtaaaccacgttcataaagattttcaagaacttctaatgaaacataccctgcacctacaaccaatactttatcaacttgatttgctttgatgaattgatcgatagcatcagtgtcttctaaatttctaagtgtaaatgtaatatcactttcaaagccaaggctatttgcacttgcaccagggcttaaaatgagtttatcgtatgattcttcaaattgttcgttggtctttctatttaatacagatacagtttgtctttcatcattgattgcaataacttcatgataagtttttactgtaatttgttttctatcataaaatttttcaggtgtatacgctaaagcatattttctatcttcaacaacttcgccaatgacataaggcaatgcacaattagcaaagctcatatcacgatctttttcaaaaataataatgtcactttctttatctaaacgtcgaatttggctggcacatgttgctccgccagcgactgctccgactacgactattttgggcatcgtaacttacctcctattgttttaaaatattataaaatgattagttataaattaacagtaatatctaatatttaaattaaagaaatcatttaaatatcgaccaattccatcttcattattgttgaatgtaatattgttcgctacatctttaagttcttgcaaaccattttccatagcaacaccgtgacgcgcgtactcaatcatttctatatcattatcttcatcaccgaatgcaataatattatttcgttcaatatttaaaaattgtctaacttgttcaatgcctcttgctttattaattccaagttttacaatttcaatgacagggaatggtgcgccccagcgtcgatgctcaatatgatcggcataaaaatgagtaagcatatttttgatttcaggtattttactttcttcggcttcaattaaaattgaggtaggggattctttcaagtggacaagtaaattaccagtttgaattcttggattacccattgaaaaaccttcaaataatcttggatcatgattattaatgaaaacataatctttcacttctgcaataatattcgatacttgatattgttgtaatccttgaataatattttgtgcgatgcctaaatctaaaatttcatggcaagttttgaagtttttatctttagggtgatgtacgtaagcgccattaaaattaacaattggtgtcgttaaatttaattcatgataatacatttgacttgcacgataaggtctgccagtcgcaatcataatttggtgtccacgttgttgtaattcatttaatacttgtttagtatatgatgaaatttctttgttatcgtttaataatgttccgtctaagtctagacatattaaatgtggttgcatatctctctcctcataagttgcttagttcatatagatacatcatagcattttattggcgttttgtcggatatttgatatattatgaataatatgacattaaagaggtgatatggatggaagaggcattgaaagatagtatcttaggtgcattagaaatggtaattgaccctgaattaggaattgatatcgttaatttaggtttagtatacaaagtgaatgttgatgatgaaggcgtatgtacagttgatatgactttaacatcaatgggatgtccaatgggacctcaaattattgatcaagttaaaacagtattagcagagattcctgaaattcaggatactgaagtgaatatcgtatggagtccaccttggacaaaagatatgatgtcacgttacgctaagattgcacttggtgtgagctaacataaacttgcattacttgtagaaattggaaatccaattggggctccgctcccaacttgcattgcttgtagaatttcttttcgaaattctctgtgttggggccccgcagtcaatataacattgtagagtataattcattgtgaataagctcccttcaaagtagacattgaagggagccttatttacgttctaggttctgactttattttgaaaatttatatctaacttgtttcagaaaatatgaattaagacagtgacttgcacttctaagagtgcacaattcatttcctatttgaatattttcttgaaaatttctataataaattgaatttatattacagttatattacaatacataatacttcatagtttttaagttgccgagttgcattacaaattggatttcgaaataagaatcatcattggtaattttttaatttaacagtattttagtcaatatgattttgatgatgtcgtaattcaataatatacatatgcatttcaatattcttttaaacagcataactaaatttaattaagcatctaagaagaacagttttaaaagggaagaatgcaaaaatgaacaaaacaaagggttttacaaaatataagaaaatgagatatatgccagggctcgatggtttgagggcaatcgctgttctaggaattattatttaccacttaaataagcaatggttgacaggtggctttttaggtgtggatacattttttgtgatctctggttatttaattacaagcttattactcaaagagtatgatgacacaggtatcattaaattgaaaagcttttggatacgtcgtttaaaacgtttattaccagcagtcatagttttattaatggttgtagggacagcaaccttattattaaaatcagataatatcattagggttaaacatgatattattgctgcgatattttatgtatcaaactggtggtatatagcaaaagatgttaattattttgagcaattttcatttatgccattaaagcatttatggtctttagcaattgaagaacagttttacatatttttcccagttattttggttacattattgttaacaattaaaaagcgatacaaaataggatttattttttggggagtatctataatttctttagggttaatgatgtttatctacagtattaatggggatcattcacgagtgtattttggtacagatactagattacagacattgttactgggtgttattttagcttttttatggccgccgtttaaattgaaaaatgatccacctaaagttgtaaaatatgttattgatagcataggtagtttatcatttatagtacttatattattatttttcattattaatgatgagacgaattggatatatgatggtggtttctatttaatatccatattaacgttatttattattgccagtgtcgttcatccatctacatggatagcgaagatattttcaaatccagtgttagtatttatcgggaaaaggtcttatagtctatatttatggcattttgcagtaattagtttcgtacatagttactatgtagacggacagatacctgtatatgtgtactttatagatataagtttaacaattatatttgcagagctatcatatcgctttatagaaactccatttagaaaagaaggtattaaagctttaaattggcgatcttcttatataccacaatttataagaatggtaattgtagtaaccttgttaattccatttatgttgattttagtaggtgcattcaataaatatggtaaagacattataggagaaaaagcgaatagctttgataccactattgaagataattattcaatgcggatagcaccaattgataacattcacattgatggcttagtaagtgagaagaaaaaggaatcttccgatgtatataataatattaaacctcttttaatcggtgattcagtaatggttgatatcggtgagtcatttaagtcatcagttcctaagtctagaattgatggaaaagtagggcgtcaattgtatcaaaccttacctttgttaaagcgaattattcacaatataaaaaatcatctgatcaagtcgtattagaattaggtacaaatggcgactttactgtcaaacagctcgacgatttacttaatcaatttggaaaagccaagatttatttagttaatacacgtgttccaagaatttatgaggcaaatgtaaatcgattattagctgacgcggcgaaacgaaagtccaatgtcacattaattgattggtataagcgatcacaaggacatagtgaatattttgcaccagacggtgtacatttagagtacaaaggagtcctagctttaaaagatgaaatattaaaagcacttaaaaagaaataacatatgtttaataagtctagttaatgtgtaacgtaacattagctagatttttttaattcaaaaaattatttacaaatattaggaaatttaagtgtaaaagagttgataaatgattatattgggactataatataattaaggtcaaagaaagtcaaagtcaaaagtgcaacttgaccaactctacaaattagaggtgaaattaatggatataaataaaatgacatatgctgttcaaagtgctttacaacaagcagttgaactgagtcagcaacataaattacaaaatatagaaattgaggcaattttaagcgctgccttaaatgaaagtgaaagcttatataaaagtattttagaacgagcaaatattgaggtagatcaattaaacaaagcttatgaagacaaactaaacacgtatgcatctgtagaaggtgacaatatacaatatggtcaatatattagccaacaagcaaaccaattgataactaaggctgaatcatacatgaaagaatatgaagatgaatatatttcaatggagcatattttacgttcggcaatggacattgatcaaacaacaaaacattatataaataataaagtagaagttatcaaagaaattattaaaaaagtaagagggggaaatcacgtgacatcacaaaatccagaagttaattacgaagcattagctaaatatggccgcgacttagtagaagaagttagacaaggtaaaatggatcctgttataggaagagatgaagaaattcgaaatacgattcgtattttaagtcgtaaaactaaaaacaaccctgtgctcattggtgaaccaggtgttggtaaaactgcaattgttgaaggattagcgcagcgtatagttaagaaagatgtgccagaatcattattagataaaactgtttttgagttagatttaagcgcattagtagcgggcgctaaatatcgtggtgaatttgaagagagattaaaagcagtcctaaaagaagttaaagagtctgatggtagaattatattatttattgatgaaatccatatgcttgtaggtgctggtaaaacagatggtgccatggatgcaggcaacatgttaaaaccaatgttagcacgaggagagttacattgtattggtgcaacaactttaaatgaatatcgagaatatattgaaaaagattcggcattagagcgtcgtttccaaaaagtagcagttagtgagcctgatgttgaagatacaatttcaattttacgtggtttaaaagaacgatatgaagtatatcatggtgtgcgtattcaagatagagccttagttgctgccgctgaattgtctgatcgttacatcactgatcgttttttaccagataaagcgattgatttagttgaccaagcatgtgcaacaattcgtacggaaatgggatcaaatccaactgaattggatcaagttaatagacgtgtcatgcaattagaaattgaagaaagcgcacttaaaaatgaatctgacaatgcgagcaaacagagattacaagaactacaagaagagcttgccaatgaaaaagagaaacaagcagcacttcaatctcgtgtagaatcagaaaaagaaaaaatagcaaatttacaagaaaaacgtgcgcaactagatgaaagtagacaagcgttggaagatgcacaaacaaataacaatttagaaaaagcagctgaactacaatatggaacaattactcaattggaaaaagagcttagagaattagaggataatttccaagatgagcaaggtgaagattcagatcgaatgattcgtgaagttgtaacagacgaagaaattggtgatattgtcagccaatggacaggcataccagtttcaaaattagttgaaacagaacgtgaaaaattacttcacttaagtgatatcttgcataaacgtgttgtaggtcaagataaagcggttgacctggtttcagatgcagtagttagagctagagcaggtattaaagatccaaacagacctattggtagtttcttattcctaggtccaactggggtaggtaaaactgaattagctaaatcattagctgcatcattatttgattctgaaaaacatatgattcgtattgatatgagtgaatatatggaaaaacatgcagtatcaagattgataggggcacctccaggatatattggacatgatgaagggggtcaattaactgaagcggttcgtcgtaatccatactcagttattttattagatgaggttgaaaaagcgcatactgacgtctttaatgtattattgcaaattttagatgaaggccgtttaactgattctaaaggacgtagcgttgattttaaaaatactattattattatgacaagtaatattggatctcaagttttactagaaaacgtaaaagagactggtgaaattacagaatcaacagaaaaagctgttatgacaagtttaaatgcatatttcaaaccagaaattttgaatcgtatggatgacatcgtattatttaaacctttatctattgatgacatgagtatgattgtagacaaaatattaacgcaattaaatataagattactagaacaacgaatctcaattgaagtttctgatgatgctaaagcttggctaggtcaagaggcttatgaacctcaatacggtgcaagaccattaaaacgttttgtacaacgccaaattgaaacaccattagcacgtatgatgattaaagagggattcccagaaggtacaactattaaagttaatttaaattcagacaataacttaacgtttaatgttgaaaaaattcatgaataaaattgaaccaagaatgtgatgattaatcgcattcttggttttttagatttgaaatttattataattgttcattggcaatatactttttaaatgatttaataaacgccaatatttctggattttcttttttgctgtatatatatgtaaatgaaataggtgcttgtaaaattttcgtgttaataaccgaaatattgtaattactattttttgttatataaataggcaggaatgatataccttgattcatttcgattaatttaattgaagtatgcacatcattgatagatagaaattgtgctttttcataaatatttaaaatattatttttaagtgatgaccaatattctggatggttatcacttattattttgtatttttcaaataaagatgcctcagttagaagatgattattctctttattgggagcaatcaatacaattttaccttcgcatactttttcagaatgaacttctcttagtttaggttgatttctgctaatcccgatgtcatacgtatgattattaatatctttttcaatattttcatttttgacatggagagaaacatcgataaacggatgctcgttaaagaaagattttaaaaatttgggcataatgaatgtcgcgatatatgaagacacgacaacatttaatttcgattgaaacatcgtctttttaagttggatatgtttgatgccactttcatattgttcaataaaactttgcgcaattggaagaaatgtatgaccatcttcagtcaagataatttgatttttataagtttcaaatagtttcacattgagatgctgttctaaatttttaatttgcttatgtatagaaggtatagtgagattaatttcttcactagctaatcgatagtttaacgtcttcgctaaaatgacaaatgtatagtaccaatccaaattcatgaacttacctctttcaaaaaagttaataattcattagataatatttaatttttattgcataaaaataatattaatattatatcagaggttatcgagggggtgaagtaatatgattcgaattcaagataatacaataagggatggtatgcaacaaagtaatgttcgaaaaagtctaattataaaaaaagaagtattgaaacaaattaacaagttaaatataaattctgttgaagtaggcatgtgtacaactatcgaggatgaatttaatattcatcaattcagagacattttaagtcctgaaaaagaattagtagtattgactaggcttaatgaaaaagaaataaaaaaaatagtcaaattaaaaattcataatttagtggtaaaaatactattgccaatatctgacttgcatataaaagaaaagcttaatttttcaaataaatattatattcagaaaatcaaagactgcttggatatattaaagaaagataaaaaaggagtagatatttgttttgaagatgcaacaaggacttctagagaaaaattgaaagaatacatggaaattatttcaaaatatcaagttagaacagttacatttgcggacactgtaggatgttcgacaccattagaatacggagatatttttaattactttgtaaaaaaatattctaacataattttttctgctcattgtcataacgatctagggttggctactgcaaatacattagctgcaattttaaatggtgcgaagcaaatagaaactacatttttgggaattggtgagagagcgggtaatgctcctattgaggaaataattactattttgacaaaaaaacaaatagaaagtacggaattcactttacccgacgtatataaaactagtattaatatttctaaaattctcgattttcaaatatcagaaaacaaacctataattggtgaaaatatatttaaacatgaatcaggaattcatcaagatggtactaaaaaaaatataaatatgtatcaatatttagttcctagtgatttaggattgaaaaattcacaagttgttcagtttccaataagtaatatttctagtaagaaaatcttgcacaataaatttaaatcaatagttaacactgaagaaattgatgaaaatatttctttttataaacttgtgaacaagttttcacctgaagtagcacctgaagatacagtggatttacttcagataataaaaaggaggagtaaagatggaaattttaaatgattctgtaaaaagttttgaaaaactttatttacaattacaagatggttttccagtgattgttcctactgatactaattataatttatgtagtttaccaaacaacgatctttgtatcgataaaatatttgaatataaaaagcgatcgaaagataagccattatcattatttattgataagccagaggattggaaattgtatggagataatcaaaatacggaaatagttgataaactagttgaaatattttggcctggaccattaaatattattttaaaaaataaaacaagctataattatatgctcaataattcagatagtatagctataggatgtgtacaaaataaaacgatgagaaggtttatttcatatattaattcacctatagcaattacttcagcaaatatctctggaactgccaatgatattttaataactgaaaatgaagcgattaagcacatgggtgaaaatgtaagatatatgctaagaagtcaaaataaaactaactataaaacgtctagtacgattattaaagtgacagataataaaattgaattattaagagaaggagatataaagtttgaagaaataaaagaaagactaggtacaggtattatttatgaataagttaatacttgggatttatttataccgaattttttcacgagcgtacttttatttaccttttttattaatttactttttggttcaaggttattccataatacaattagaaatattaatggcgtcttatggcattgcagcatttttattctctctatacaaagagaagtgttttaaaatttgtaacttaaaagattctaataaattagttgttagtgaaatattcaaaatcatcggtttattgttgttattatatcaaaatcaatatttaattttagtagtggcacaaatattattagggttaagttactcaatgatgacgggtgttgatacagcaataattaaaagaaatataacaaatgagaaatacgtacaaaataagtcaaatagctacatgttcctatcattattaatttcagggattataggtagttatctttatggaataaatattaaatggcctataataatgactggtatattttcaattctaacaattataattattcgctgcacattagttgaaaatagggaattaaatttaataggagaaacaaagggaaagataaagaaatttctaccggaagagaagttttggatattgcattattcttttttaagagcgttaatattaggattttttataggatttattccaattaatatatataatgatttaaaactgaataatttacaatttatttcagtattaacttgctacacagttatgggttatttatcttcacgttatttaaccaaatacttgaactataagtttgtgtcagaaatttgtttagtaatatttttaataatatatacatatcaaagtttcatagcagttactatttctatgatatttttaggtatttcttcagggttaactcgtccacaaactataaataaactttctagcagtagtaacttaagagtgatgcttaattatgcagaaacgttatattttatttttaatatcgcatttttacttatgggtggttacttatatacaataggaactattcaatacttaatattatttattgcattattaatttttatatatttaataataatattttattttacaaggagagagcaacatgaaactaaaaactgaatttaaagggaacaatataccatatgaatacgcagcaggtgcagatgtgagtgattctattaacgggaatccaattaaatcatttccatttgaagtaactgaattaccggaagggactaaatatcttgcttggtctttaattgactatgatgcaatcccagtatgtggctttgcttggattcattggagtgtagctaatgtaagtgttagtggcaattcaatttctattaaagcagatttatcaagaacaaagggcgactatgtacaaggtaaaaatagcttcactagtggtttgttagctgaagatttttcagaaatagaaaatcactatgtaggaccaacaccacctgataaagatcatcaatatgaattaacagtttatgcgttagatcattctttaaatttgaagaatgggttctacttgaatgaatttttaaaagaagtaaatcaacataaaatagatcaaacaagtattaaccttataggaagaaaaatttaatattaaatatctcatcaatataaaattgttcaattaaaagtacgaagaaacaagggatttaatttatatattaggtacggcgttcgctataatgcaatgaagtaattaaatttaagaaatgtaaacttagttattgtaatgtgaatttatttgaaaaaatagaaagtattaacaattatagcttttacattaattaaaatttatttttaaaaacaagtaaacaatttacatacttataatttttgaaacttttagatttgtgttatattgattttgtaagatactttaactcacaaaggagagagattatatgaaattaaaatcatttataactgtaactttggcactgggcatgatcgcaacgactggcgctactgtggcaagtaatgaggtatctgcagcagaaaaggacaaactaccggcaactcaaaaagctaaagaaatgcaaaatgttccatatacaattgcagtagatggcattatggctttcaatcaatcttacttaaatttaccaaaagatagccaattatcatatttagatttagggaataaagttaaagctttattatatgatgaacgtggtgtaacacctgagaagattcgaaatgcaaaatctgccgtttacacgattacttggaaagatggcagtaaaaaagaagtggatttaaagaaagatagttatacagcaaacttgtttgattcaaattcaattaagcaaattgatattaatgtaaaaactaaataaacacttaaaattatcaaattcaacatgaagcatttaattttacagtgatgattataatataattgccttgatacaaagattactcgtaaatgacatctttgtattaaggctttttctaaatttaaaagtgatgggttagaggtcattgagttttaaaatattccaaatacaaaacattaatggccaaaaataaaagccgcctttatctgggcagcttcaataataagaaagacatatttcattttatactaaatagttattgtgatgaatctttcggcggtttaattactgcagcgaaaattgctgtgaaaatcgtgaacaatactgccatgataattggattcactacatttaagctgtctccacctactaggctattaagtacaaagttaaccatttgcattaataataatgcccaaaagaatgttacgaggtgtttcatgtcattctacctccactttaattatatatattttattttaagtgaaagttagaaatttgtatagtaacatctcatatattttgaccatattatacagtttaaataaatgattttatctgaatggctattctaaattaagcgcattaaaatcaatttcatactgaaatttgacgataataaagcattaaaattttattaactagtcaatattcctacctctgacttgagtttaaaaagtaatctatgttaaattaatacctggtattaaaaattttattaagaaggtgttcaactatgaacgtgggtattaaaggttttggtgcatatgcaccagaaaagattattgacaatgcctattttgagcaatttttagatacatctgatgaatggatttctaagatgactggaattaaagaaagacattgggcagatgacgatcaagatacttcagatttagcatatgaagcaagtgtaaaagcaatcgctgacgctggtattcagcccgaagatatagatatgataattgttgccacagcaactggagatatgccatttccaactgtcgcaaatatgttacaagaacgtttagggacgggcaaagttgcctctatggatcaacttgcagcatgttctggatttatgtattcaatgattacagctaaacaatatgttcaatctggagattatcataatattttagttgtcggtgcagataaattatctaaaataacagatttaactgaccgttctactgcagttctatttggagatggtgcaggtgcggttatcatcggtgaagtttcagaaggcagaggtattataagttatgaaatgggttctgatggcacaggtggtaaacatttatatttagataaagatactggtaaactgaaaatgaatggtcgagaagtatttaaatttgctgttagaattatgggtgatgcatcaacacgtgtagttgaaaaagcgaatttaacatcagatgatataggtttatttattcctcatcaagctaatattagaattatggaatcagctagagaacgcttaggtatttcaaaagacaaaatgagtgtttctgtaaataaatatggaaatacttcagctgcgtcaatacctttaagtatcgatcaagaattaaaaaatggtaaactcaaagatgatgatacaattgttcttgtcggattcggtggcggcctaacttggggcgcaatgacaataaaatggggaaaataggaggataacgaatgagtcaaaatataagagtagttattacaggtatgggagccctttctccaatcggtaatgatgtcaaaacaacatgggagaatgctctaaaaggcgtaaatggtatcgataaaattacacgtatcgatactgaaccttatagcgttcacttagcaggagaacttaaaaactttaatattgaagatcatatcgacaaaaaagaagcgcgtcgtatggatagatttactcaatatgcaattgtagcagctagagaggctgttaaagatgcgcaattagatatcaatgaaaatactgcagatcgaatcggtgtatggattggttctggtatcggtggaatggaaacatttgaaattgcacataaacaattaatggataaaggcccaagacgtgtgagtccatttttcgtaccaatgttaattcctgatatggcaactggacaagtatcaattgacttaggtgcaaaaggaccaaatggtgcaacagttacagcatgtgcaacaggtactaactctatcggtgaagcatttaaaattgtgcaacgcggtgatgcagatgcaatgattactggcggtacggaagctccaattactcatatggcaattgcaggtttcagtgcaagtcgagcgctttctacaaatgatgacattgaaacagcatgtcgtccattccaagaaggtagagacggttttgttatgggtgaaggtgctggtattttagtaatcgaatctttagaatcagcacaagctcgaggtgcaaatatttatgctgagatagttggctatggtactacaggtgatgcttatcatattacagcgccagctccagaaggtgaaggcggttctagagcaatgcaagcagctatggatgatgctggtattgaacctaaagatgtacaatacttaaatgcccatggtacaagtactcctgttggtgacttaaatgaagttaaagctattaaaaatacatttggtgaagcagctaaacacttaaaagttagctcaacaaaatcaatgactggtcacttacttggtgcaacaggtggaattgaagcaatcttctcagcgctttcaattaaagactctaaagtcgcacctacaattcatgcggtaacaccagacccagaatgtgatttggatattgttccaaatgaagcgcaagaccttgatattacttatgcaatgagtaatagcttaggattcggtggacataacgcagtattagtattcaagaaatttgaagcataattataaaaatcttcagtaacgttgttttagttactgaagattttttctgtttctttatactaagatgagcgacagcacaatcgtcataataaaatataaaatatttattaataataagggtattatccatgtagaaacaaagtaatgctctttttttacctcttgtgggttgaaaaatggatcatcagagatagacttcttctttttcgaagatgacatttgatactttaatcttctaaaaccataacttgtcgcatcaaaaatgccttcttgtacaagtaaaatcaaaaaaatgctaataaaaataattaatgaaacataaaacaatatatttaaatatgtaatgatagtatggctattaaaaacccatataataaacgttagcattggggttattagtgccattccaagccattttttcaacatttgatcactcccacttatagaaaactcttacgcatagtttacattaaaatgagacattgaggaatgattttttaatttcttcagctttattgaaattctaaaatcaatcattcttcattagtttaaagcaaaaaaatattgatatatagtaaatattgtatatataatattagttaagatttcagaaaattttgaagggaatggaaatttagaaatcggaatttgttagaggaggggattagatggggaaatatatttttaaacgatttatttatatgcttatttctttatttattattattacaattacatttttcttaatgaaattaatgccaggttcaccatttaacgatgctaaattaaatgctgaacaaaaagaaattttaaatgaaaaatatggattaaatgatcctgtagcaacgcagtatttacattatttaaaaaatgttgttacaggggattttggtaattcattccaatatcataatcaacctgtgtgggatttgattaaaccgagactattaccttcttttgaaatgggtcttacagcaatgttcatcggtgtgatactgggtcttattttaggtgttgcagcagctactaaacaaaattcttgggttgattatacaactacagttatttcagttattgcagtatctgtaccatcttttgtacttgctgtacttttacaatacgtatttgcagttaaattaagatggttcccagtagctggatgggaaggtttttcgaccgcggtattaccgtcacttgcattatctgcagctgttttagcaactgtcgccagatacataagagcagagatgatagaggtattaagttcagactacattttattagcgagagctaaaggtaattcgacaatgcgtgtactttttggacatgcacttagaaatgctttaattccaattattacaattatcgttcccatgttagcaagtattttaacaggcactttaacaattgaaaatatttttggagttcctggattaggggatcaattcgtacgttcaattacaacaaatgatttctcagtaatcatggcaatcacactattatttagcacactgtttatcgtttctatttttattgtagatattttgtacggtgtgatagatccacgaattcgtgttcaaggaggtaaaaaataatggctgaaaataaaaacaatttgtcgattaacgacgatcattctaatgcagctatgacgcatacctctgacgctatcgcatcatctgattttattattagagaattagatttgaatcaggaacctgaaatgcaacgagaaagcaaaaacttttggcaagatgcttgggctcagttaaaacgaaataagttagctgttgtcggtatgataggtttaattatcattgtaatatttgcttttatcggtccagttataaataaacatgattatgctgaacaaaatgtacaacatagaaatcttccggcaaaaatacctttattagacaaagttccatttttaccttttgatggtaaagatgcagatggcaaggatgcttataaagcagcaaatgctaaagaaaattattggtttggtactgatcagttgggtcgagatttatggacaagaacatggaaaggtgctcaaatttcattgtttatcggtgttgttgcagcgatgttagatatttttattggcgttgtatatggtgcgatttctggattcttcggtggacgtgtcgatacgattatgcaacgtatacttgaagtcatagcatctattccgaatttaattgtcgtaattttatttgtattaatttttgaaccatccatttggacaattatattggctatgtctatcacaggctggttaggcatgagcagagttgtacgtggagaatttttaaaattgaaaaatcaagagtttgtcatggcttcgaaaacattgggggcttctaaattcaaattgatatttaagcatattttacctaatacgttaggtgctatcgtggttacatcaatgtttacagtacctagtgctattttcttcgaagcatttttaagtttcattggtataggtgtacccgcacctcaaacatcgttagggtcattagtaaatgatgggcgcgcaatgttattaatttatccacatgaattatttataccagcaatgattttaagtttattaattctattcttttacttatttagtgatggattacgtgatgcatttgatccgaaaatgcgtaaataaaagggggcatagcatatgactgaaagaatattagaactaaatgatttgcatgtttcctttgatattacagcaggggaagtgcaggcagtgagaggtgtagatttttatttaaacaaaggggaaacattggcaattgttggtgaatcaggttcaggtaaatctgtgacaacaaaagcaattacaaaattattccaaggggacacaggaagaattaaaaagggagaaattttatttttaggggaagatttagcaaaaaaacctgaaaatgagttaattaaattacgtggaaaagatatttcaatgatctttcaagatccaatgacatctttaaacccaacgatgcaaattggtaaacaagtcatggaaccattaattaagcacaaaaattatagtaaagcacaagctaaaaagctcgcattggaaatactaaatcttgtaggattaccaaatgcagaaaaaagatttaaagcatatccacatcaattttcaggtggacaaaggcaaagaattgttattgcaaccgcattagcttgtgaacctaaagtgctgattgctgatgaaccaacgactgcattagacgtaacgatgcaggcacaaattttagatttaatgaaagaactacaacaaaaaatcgatacagcaattatttttataacgcatgatttaggggttgttgcgaatattgctgatagagtggcagttatgtatggtggtcaaatggttgaaacaggagatgttaacgaaatattttatgatccaaagcatccatatacatggggattattatcgtcaatgcctgatctatcaacaacaaatgacacaccattactagcgattcctggagcgccacctgatttattacacccacctaaaggtgatgcatttgcgagacgtagtcaatatgcattagatattgattttaaagtagaaccgccgtggtttaaagtttcaccgacacattttgtgaaatcttggttattagacgcacgtgcaccaaaagttgaactacccgagctggtaaaacaacgtatgaaaccgatgcctaataattatgaaaaaccactcaaggtagaaagggtgtcgttcaatgaaaaatgatgaagtgctattatctattaaaaatttaaagcaatattttaacgcaggaaagaaaaacgaagtgagagcgattgaaaatatttcgtttgaaatatacaaaggagaaacattaggtttagtaggagaatcggggtgtggtaaatctacaactggtaaatcaattatcaaacttaatgatattacaagtggagaaattttgtatgagggtattgatatacaaaagattcgtaaacgtaaagatttgcttaaatttaataaaaagatacagatgatttttcaagacccatatgcgtctttaaatcctaggttaaaagtaatggatatagtagctgaaggtattgatatccatcatttagcaactgataagcgtgaccgtaaaaaacgtgtctatgatttacttgaaactgttggattaagtaaagaacatgccaatcgttatcctcatgaattttcaggtggacaacgccaacgtattggaattgcccgtgcattagccgttgaaccagaatttattatagcagatgaacctatttcagcattggatgtttcaattcaagctcaagtagtcaatttgttattaaaattacagcgtgaaaaaggtattacattcctatttattgcacatgatttatcgatggtgaagtatatctctgatcgaattgcagtcatgcattttgggaaaattgtagaaatcggaccagcagacgatatttatcaatatccattacatgattatactaagtctttattgtcggcaattcctcaaccggatcctgaatcggaacgtagtcgtaaacgatttagttatattgatgatgaagcaaataatcatttaagacaattacatgaaataagaccacagcattttgtctttagtactgaagaagaagcggcacgactacgaaaaaatttgttggtaacacaagattaaggggaagggagaaatgaaatgacaagaaagttaaaaacgctgattttaatatttgttgccacaattgcattaagtggttgtgctaatgatgatggtatttattcagataaaggtcaagtattcagaaaaattttgtcagcagacttaacatcacttgatacatcattaattacggatgaaatatcttctgaagtgactgcgcaaacattcgaaggtttatatacattaggaaaaggtgacaaaccggtgttaggtgttgcgaaagcttttcctgaaaagagtaaagatgggaaaactttaaaggttaaattaagaagcgatgctaaatggagcaatggtgacaaagtgactgcacaagactttgtttatgcttggagaaaaacagttgaccctaaaactggttctgaatttgcatacattatgggggacattaaaaatgcgagtgatattagtactggtaagaaacctgtagagcaattaggtatcaaagcattagatgatgaaacattacaaattgatttagaaaagccggtaccatacattaatcaattattagcacttaatacatttgcacctcaaaatgaaaaagttgccaaaaaatatggtaaaaattatggtacggcagctgatagagcggtatacaatggtccatttaaagttgatgattggaaacaagaagataaaacgttactatctaaaaatcagtattattgggataaaaagaaagtaaaattagataaagtgaattataaagttattaaagacttacaagcaggtgcatcattgtatgatactgaatctgtagatgacgcagttattacagcagatcaagtaaataaatataaagataataaaggattaaactttgtgttaacgactgggacattttttgtaaaaatgaatgaaaaacaatatcctgattttaaaaacaaaaatttaagactggctatcgcacaagcaatagataaaaaaggatacgttgattcagtgaaaaacaatggttcaattccttccgatacactaacagccaaaggcattgcgaaagcacctaatggcaaagattatgcgagtaccatgaattcacctctaaaatataatcctaaagaagcaagagcgcactgggacaaagctaaaaaagagttaggtaaaaatgaattgtcattttcgatgaacacagaagatacaccagatgcaaaaatatctgctgaatacatcaaatcacaagttgagaaaaatttaccaggagttactttgaaaattaagcaattgccgtttaaacaaagagtatcactagaactgagtaacaattttgaagcatcacttagtggttggtctgcagattaccctgatcctatggcttatttagaaacaatgaccacaggtagcgcacaaaataatacagactggggtaataaagaatacgatcaattacttaaagtagcgagaaccaaattggcacttcaaccgaacgaacgatatgaaaacttgaaaaaagcagaagaaatgttcctaggagatgcaccggtagcaccaatttatcaaaaaggtgttgcacatttaacaaatcctcaagtaaaaggattgatttaccataaatttggtccaaataactcacttaaacatgtatatattgataaatcgatagataaagaaacaggtaagaagaaaaaataatttgctttgtaaattagactggagatatatctccagtctttttgtgttgcagaaaaactttgggaataaaaaattaaaataagtcgttttttaaattactgaaattgattaaatgcataaatgactgaatattctaaaaataaacttgtaataattttttctatgagtaaactaaaaagaaaatattagattgaaagtaggaggcatatgtatggggaagcttattaaatatatttcaatacttcttattgtcgttttagtgttgagcgcttgcggaaaaagcagtaataaagatgaaggagtaaaagatgctactaaaacagaagcgtcaaaacataaaggtggtactctaaatgtagcgttaacagcaccgccaagtggtgtttattcttcgttattaaatagtacacatgcggatgctgtagttgaaggatattttaatgaaaacttattaacaattgttgatttgtcaatttaagtgcaacagttcatcacataaaacttcataaggaaacttccaatttaaacactttcttggtcgataattaattgagtctaatgcatagttaagttgctcttgatttactttagctaagtctgttttcttagggaaaaattctcttagtaaaccattggtattttcatttgtacctctttgccatgcggaatatggatcagcgaagtagacattaatattaaattggttttcaatattttgataacaagagaactctttccctctatcgacagtaatagttttaacggcacctttaggtagatgtttgataaggttattaattgccgtctccatagaattagaggaacgatcaggcataagtacacaataataataacgtgattttctttctgcgaaagtagcaatgcaccctttacttttgcctctgctggatacaattgtgtcagcttcccaatgaccgaatgtattacgtttctttatttccttaggacgttgtgaaataggacggccaatattaaacttacctctagtttctttaggtttctgtctttttcctttttgacgaaggcatgaaataagttcgaaattaatcatattagagttaatccatcgatagatggttttaaaacagatttggttttgtaatagacgacctacgatttgttcaggagaccagtggcattttaaataatatttaatgatattaccaagttctggagtaaatcgagtaggacgaccacaaagttttcttttggtttcataatttttttgagctgtttcagcttgatatgactgatttaaattattcctactaatttcacgtgagatagtagatacagatcgttttaatttacgtgcaatagatcttaaagaataattttcttgacgtaaaacctctatacgtgcgcgttcagttagtgtaagatggttatagctcatgttggcactccttgtatgtgtttttgtggttattaacatcttacaacaaagtgccaattatgggcattttttatgaatttttataggtgttgcacttaatattacaatccgtcaattgataaaaaaatacatcctaaagcatatattgcttcatggaaggatatcgagccggctaagaaaatagaatttaaaattaaaaaaggtattaaatggcatgatggtaatgaattgaaaattgatgattggatttattcaattgaagtcttagctaacaaggattacgaaggtgcttattatccaagtgtagaaaatatccaaggtgcaaaagattatcatgaaggaaaagctgatcatattaacggattgaagaaaatagatgactacacaatgcaggttacatttgataaaaagcaagaaaattacttaacaggatttattactggacctttattaagtaaaaaatatttatcagatgtaccaattaaagatttagcgaaatcagataaaatccgaaaatatcctattggtattggaccatataaagttaagaaaatcgtcccaggtgaggctgttcaacttgttaaatttgatgattattggcaaggtaagcctgcattagataaaatcaatttaaaagttattgatcaagctcaaattattaaggcaatggaaaaaggcgatattgatgttacgaatgatgctaccggtgcaatggcaaaagatgctaagtcatctaatgctggtctcaaggtattatctgcgccaagcttagactacggtttaataggattcgtatctcatgattacgataaaaaagctaataaaactggtaaagtgagaccaaaatatgaagacaaagaattacgtaaagcaatgctttatgcaattgatagagaaaaatggatcaaagcatttttcaatggttacgctagtgaaataaatagttttgtaccatcaatgcattggatagcagctgatcctaaggaactaaacgattataaatatgatcctgaaaaagctaaaaaaatcttagataagttaggttataaagatcgagatggtgacggatttagagaagatcctaaaggtaataaatttgagattaactttaaacattattcaggttcaaatcctacttttgaaccaagaactgctgcgataaaagatttctgggaaaaagttggcttgaaaacaaatgtgaagttagtagaattcggtaaatataatgaagacttagcaaatgcatcaaaagatatggaagtgtacttcagatcatgggcaggtggtacagatccagacccatcagatttataccacactgatagacctcaaaatgaaatgagaacagttttaccaaaatcagatcaatatttagatgatgcattagacttcgataaagtaggcattgatgaaaagaaacgtaaagatatttatgttaaatggcaaaaatatatgaatgatgagttacctggattaccaatgttccaaggtaaatcgataactatagttaatgataaagtacgaaacttagacattgaaattggaactgatcaaagtttatataatttaactaaagaagcttagtaatgtaacctcgacgattttgtcgaggtttacttatatggggggatgttatgaataatgtattgttagaggttaaagatttagaaacatcattaaaaataaataatgaatggttagcaactgttgaaaatatttcttttgaattatctaaaggagaagttttgggtatagtaggggaatctggttgcggtaagtccatattaagtaagtcaattattaaattattaccagaaaagatatctaaactaagtaatggagaagttatatttgatggtaaacgaatcgatacgctcaatgagaagcaattgctagatattcgaggaaatgatattgctatgatttttcaagaacctatgactgctttaaatccggtatttactataaaaaatcaacttgtggaatctataaaatcacataaaaaaatttctaaaaaagaagcaaataacttagcaaaagatttactaaaaaaagttggaattgcaagacaagatgaaatattaaatagctatccccatcaattatctggtggtatgaggcaaagagtaatgattgcaatggccatttcatgttctcccaaattattaattgctgatgaacctacaactgctttggatgtcacgattcaagcgcaaatattagacttattaaaagaattgcaaaaggaaacgcaaatggcaattatgatgattacacatgatttgagtgtggttgctgaattttgcgataaagttttggttatgtatgcaggtcaaattgtagaatttggaggcataaaagaaatactacacaatccgaaacatccttatacccaaaaattattatctacaattccaaaacttaaagaagagcagaaacgacttgaaacaatagaaggaattgtgccatcaatccaagcatttcacgttaataagtgcagatttgcaaatagatgtaacaaaaaactggatatttgtaataatcaatctcctaaaatgcatgtttgtgaagacgtcattgtacggtgtcatttataccaaaatgaatataaggagatataagaatggaaaatattttagaagtaaatcaagtaaaaaaatactacaaaattaaaactggattattacaaaaaactcagtacgttaaagctgttgatgacgtatcgttttcaataaaaaaaggacaaacttttggattggtaggcgaatcaggttgtggtaagtcaacgttaggtaaagtgattatcagacttgaagatgcaacttcaggctcaataattgttaatggtgaagatataacaagattacaaggtaaaaaactgagaaaatcacgacaacaatatcagatgatatttcaagatccgtatgcatcattgaatccgatgcaaatggttggagatatcatttcagaacctattttaaattataaaaaattgccaaaagaagaaataaaaaaagaagttctatatttattaaaatgtgttggtctaagtgaagatgcatattataaatatgcacatgaattttcaggtggacagagacaaagagtgggaattgcaagagcattggctttgcgtccgagtttaattgttgctgatgagcctgtaagtgcattagatgtatctgttcaatctcaagtactgaatttattaaaagatttacaagaacaatttaacttaagctatttatttatcgcacatgatttaagtgtagtaaaacatataagtgatgtcattggagttatgtatttaggtcatatagttgaaatcgcatctgataaagaaatttatgaaaatcccaaacatccttatacaaaagcgttgatttcatcaataccacaaattgataagctaaataaaaatagaattatattaaagggagaattaccttcgccaagtaatccgccacaaggttgtcctttccatactagatgtccaattgctcaagatatgtgcaaaaaaagtatgccagaattaaaggacattggtaacgaacatcaagtcgcttgtttctacgtagataaagtaggtgatttaaatgattaaattaatacttaaaagattagggttaatgatcccgttactaattttaatttcaatagttgtattttcattagcaatcatacaaccaggagatccattttcagatctacaaaacggtaaaataaaacaagaagcaataaatgcacaaagggaaaaattaggtctcaacgactcaataccacatcaatacattagatgggtcaatcatgttatacacggtgatttaggggagtcaatcaaatataaaaggccggtaattgatgttattgaggaaagaattccaaatacaatattactcggtgctatgtcattaattattacttatattatctcatttgctttaggaataacgtcaggtagatattcttacagtttgacggattatactgtgcaaatatttaattatttgatgttagccattccatcttttattgcgggagtatttgcaatttttattttttcttttgaattacaatggttcccgtttcaaggttctgttgatattaaccttaaagaaggtacttttgaatattatatgagtaaaatatatcacacatttttacctgcattcactttaggtttattatctactgctggttatattcaatatttacgtaatgatattattgaaaattctaaaaaagattatgtattgacggcaaggtcaaaaggattatctatgaataaaatttataataaacatatattgagaaattctctaatacctattattacatttttaggtgctgatattgtaagtattttaggtggagctgtgattacggagactatcttttcatataacggtatcggtaaattatttttagaatcggtaataggccaagactatccattaatgatggcattaacgttatttttctcatttttaggtttactgggtaatttgatttctgatattacttatggatttatagatccaagaattagaagtaactaggggggattagaatgcaaaataagtcaaaatcgccttttaaaattgcattgtctaaatttattcataataaaattgcaatgttatcggttatttttttattaatcataactattgtatcaattatagcgccattaatagctccttttccagtgaaccaacaagatttattaaatataaaaggtgaaatgacagcacaaaacattcttggtacagactctggtggtagggataactttagtcgtttgttatatgcaggtcgtatttcattatccattggaattacatctacaataggaatgcttttgattggaattacagttggagtgatttctggttattttggaggtattgttgatacattattaatgagaataaccgaatttgttatgttatttccatttttaatatttgcaattgtattaaatgctgcacttggagataaaattaaaaatccttatggatctgccataattcttgttctagttattatcgtattaagttggggaggtattgcaagacttgttcgtggtaaagtacttcaagaaaaagaaaatgaatactttttggcagcaaaatcaattggtacacccacatataaaattattttgaaacatcttttgccgaatatattaagtgtagttatcgtacaagcaacattgttatttgccggtatgattgtagtggaatcaggattgagctttttaggattcggaattagtaaagcaattccatcttggggtaatatgttgagtgatgctcaagaaggggatgttataagtggtaaaccgtggatatggatgccacctgctataatgattacattaactatattaagtataaactttgtaggggaagggcttaaagatgcttttaatcctagaggtagacgttaaataataaaagagtctgggacataaatccctgaactgcacccagtctagtagacaattaaataattaaaattaatggttggttttgttgttatacagaatcagccatttttaatgtaattctttcatgattaaagaaaagaataaaatcatgaattgtttttgtagcttcttctacactattaaatttaaagtgcttatttcctctaaaaatttcactttttattgtaccccatacaccttccattggaccgttatcgatacatttgctaacacgtgacatactttgaatcatgccacattcatccaacatatgtttaaatgttttcgatgtatattgaaaacctcggtcactatgaaataaaatacctttggtattttctactttttctatcgcttgattgaatgttttaaatactaattgattattgttagaagggcctagctcataactaacaatacgtttagcacctaagtcataaatggcactcaaatatatcttactaccttctttgattttaaattctgttacatctgttaaccaaactttatttggcgtatcaatgtcaaattgtcgattaagcttattttctgatgtgatttgtggcgttgaacgtcgataaggttttcgcttttgacgtattactgcttttaaattaagttctttcatcaaacgataaattcgctttcggtttacttgtttacctagttttaagcgaatatagatataaatgcgacgatagccataaataccattatacttatgatagattgattctatttctcgcttaagctgttcattctctaattcaagttcactcgattgataatgtacccacttataataactcgctctagaaatgcctaaaatacgacacaagcgttggatagggtattgatgttttaacgcttcgatcgttttgtatgccgtgatttgttttctctttgaatcatctctctttccaatgcttgaaacttttttaaaacgtcattttccatctctaataatcgattttgtgcttttaatgcttgaatttcagcttctttttgttcttctggcgtcatcatagatttgggttttcctttgcctctgccatctactaatccatttttaccatgtgcttgatacttatgaacccactggtaaatttgaccgtatgagatattaaagtgttctgcaacttctctataagattgtttatgattcaagtaatattcaacaattgttacacgttcttcaaatgtggtttttcttgctttcatgatatacaccccagttttaggagattgattcttaatctcttttcctacagtatacatttttatccaatttttgacttgtgtcgaactacgaatattgtatttgattgcgatgtcttgggttgattgatttgaattcaaatattcatttacaacttttaattttagttcctttgaatagtgattgtattgtttttgtgtaagtagtgtttcaataccatgggttttataatatttatacttaggatacaaagtattgacattaatatctaattgtaatgtatcgattaagtattgaaacgacacgcctttttcatattcttgaaacatatatagcagtacatctatgtctactttaggttttattgacataaataaagctcccttcaaagttttcattttttcaatgtctactttgaagggagcatttcaccctaaaaaaacagcagtaagataattttcaattagaaaatatcttactgctgttctctatttatacaatacttcgtattgaatggcttcgctttcctagggtgccgtctcagccttggtcttcgactggcactgctccctcaggagtctcgccattaatactacgtattaacatgtaattttactttgaaatactttaaaaaaataagacactttcgtataatttaataaataccactaaactaaattaacgaggtgccttatgtataaaaattataacatgactcaacttacactaccaatagaaacttctgttagaattcctcaaaatgatatttcgcgatatgttaatgaaatttttgaaactatacctgatagcgaattcgatgaattcagacatcatcgtggtgcaacatcctatcatccaaaaatgatgttaaaaatcatcttatatgcatatactcaatctgtattttctggtcgtagaatagagaaattacttcatgacagtattcgaatgatgtggttagctcaagatcaaacaccttcttataaaactattaatcgttttagagtgaatcctaatactgatgcgctaattgaatctttatttattcagttccatagtcaatgtttaaagcaaaatcttattgatgataaatcaatttttattgatggtacaaaagtagaagctagtgccaatagatatacatttgtgtggaagaaaagtattcaaaattacgaatcgaaattgaacgaaaattcaaaagcattatatcgtgacttagtcgaagaaaaaataataccagagataaaagaagatggagatagcgatttaacaatagaagaaatagatttaattggtagtcatttagataaagaaatcgaagatttaaatcattctattcagaacgaagattgtactcaaattagaaaacagacccgtaaaaaaagaactgagattaagaagttcaaaaagaaatttgatgattattccgaaagaaaaagtaaatatgaagaacaaaaatcgattcttaaagatagaaatagcttttctaaaactgatcatgatgcaacttttatgagaatgaaggaagaccatatgaaaaatggccaacttaagccaggatacaatttacaaatagcgacaaattctcaatttgttttatcctatgacctatttcaaaacccgacagatactagaactttaattccatttttaacaatgattcaaaataccttcggttatttaccggagtatattgtagctgatgcaggttatggtagtgagcaaaactatatggctattatagatgattttaataaaacgccacttattacgtatggtatgtttattaaagataaaacgagaaagtttaaaagtgacatttttaagactcaaaactggaaatatgacgaacttaatgatgaatttatatgtcctaataacaaaagaataggtttaaaaagatatgcataccgtaatgatagatatggttttaaacgtgacttcaaactatatgaatgcgatgactgttcagcatgttctttgaggcaacaatgcatgaagccaaattcgaaatccaataagaaaatcatgaagaattataattgggaatactttaaagcccaaattaatcaaaagctttctgaaccagaaacgaaaaaaatctatagtcaaagaaaaattgatgtagagcctgtttttggatttatgaaggctattttgggtttcactcgaatgtcagttcgaggaataaataaagttaaacgagagctaggttttgtattaatggcacttaatataaggaaaatagtagctcgacgagctgtatattatcaaatacatttaaaaaaagctgatttctatcaaataattaatagaaatcagcttttttacattgcctaagaacttaatgtcccaagctctttattttatctcttacgtcctaaacccatcgctttttccatttttttgacagttttaaatgaagctttatgtgctttatctctaccttgatctaaaatatcatcaagtttatctgagttatagaaactttcgtatttttcttggaattctactaaaaatgctttaactatttcagcaaggtcgcctttgaatttaccgtaaccttcgccttcatattttgcctcaatatctttaataggcatgtctgttaatccagcgtatattgaaattaaatttgtaatacctggtttattgtcgcggtcgaatttaataataccgtctgaatcagtcacagcacttttaatttttttagcagcaacatttggttcgtctaataatgaaataaagtttttagcgttgtcatcacttttactcatttttcttgttggatcttgtaaactcataacacggccaccgactttaggcatacgaatttcaggtttcacaaggacatcattataacgactattaaatctatctacaagattacgtgttaattcaatgtgctgcttttggtcatcgccaactggaacgatattagtattgtaaagaacaatatcagctgccattaaaggtggatatgttaatagaccagctggtataccttcaactgctttctgagctttatctttgtattgcgtcatacgctctaattcgccaacagaagcaattgtagttaacatccatcctgcttgtacgtgtgcagggacttcagattgtatgaacaatgttgctttgtctggatctataccagaagctaaataaatcgctgctaattgtctagtttgtttacgtaattttaagcgatcttgtggcattgtaattgcatgttgatctacgatacagaaataacaatcatagtcgttttgcacatcaacaaattgctttaatgcgccaatataatttccaatagtaggaattccactaggttgaatgcctgaaaataatgtttccatttaaatgcctactttcttagtaataatttaacaattatcattataacagtatttcttaaaaatgtaagatgtgttagaatatatgtataacttgctactaacaaagggattaataatcttttttataagtgtagaaacttatctgaaaaattaggtttttctcatttaattttaatgttagatagttataataaatagtaacgattaagaattttagaaaaaaatgttttttcttgatctataactaaattttaagcaatgaattttattcattcaaataggagagtgagatgtatggtaacattatttacttcaccaagttgcacatcttgccgtaaagcgaaagcatggttacaagaacatgacattccgtatacggagcgtaatattttttctgaacatttaacaattgatgaaattaagcaaatattaaaaatgactgaagacggtactgatgaaatcatttctacacgttctaaaacataccaaaaattaaatgttgatattgattcactaccattacaagacttatattcaatcattcaagataatcctggcttattacgtcgtccaattattttagataataaacgactacaagttggttataatgaggacgagattcgacgtttcttacctagaaaagttcgtacgttccaattacaagaagcacaacgtatggttgactaataaccatttaactatgtgtcatactttactaaaagatatgtcaagcaacgctatttctatagtgttgcttttttggttttaaatttacaataattgcttagtatcttttaaatcaaatgtgcaattgttaatatagctctatattagagtgttttggatgaaacatttgctatgataaggtaaaattaaattaagaaagtgctttaatgctttaactgtataaatcatttaaatagttttgctacaacgaatatgttattataagttaccaaaatattttagagaaagaaatcaaacaaatatattgtattttgtttgatgctttaatacaatgtggatactattcatcgactgtaaggagtgagatgatatgagaatagaacgagtagatgatacaactgtaaaattgtttataacatatagcgatatcgaggcccgtggatttagtcgtgaagatttatggacaaatcgcaaacgtggcgaagaattcttttggtcaatgatggatgaaattaacgaagaagaagattttgttgtagaaggtccattatggattcaagtacatgcctttgaaaaaggtgtcgaagtcacaatttctaaatctaaaaatgaagatatgatgaatatgtctgatgatgatgcaactgatcaatttgatgaacaagttcaagaattgttagctcaaacattagaaggtgaagatcaattagaagaattattcgagcaacgaacaaaagaaaaagaggctcaaggttctaaacgtcaaaagtcttcagcacgtaaaaatacaagaacaattattgtgaaatttaacgatttagaagatgttattaattatgcatatcatagcaatccaataactacagagtttgaagatttgttatatatggttgatggtacttattattatgctgtacattttgatagtcatgttgatcaagaggtcattaatgatagttacagtcaattgcttgaatttgcttatccaacagacagaacagaagtttatttaaatgactatgctaaaataattatgagtcataacgtaacagctcaagttcgacgttattttccggagacaactgaataacgatattaattaagcaacgcactatgaaaggagactctttggagtctcttttttttattgtttcaaaagctgaaaaagtaatagtagttaaacttacgtgtaatattttgaggtgaagatatgttagtagctttaaatgaagaaaaggaacgcgtgttagcaactactgcattgagaaagacacaatatttttgtccggtgtgtggcaagcaagttattttaaagcgtgggctcaaagtaattagtcattttgcacataaacatttagcggaacaaaaatgttttaataatgaatcgattaaacattataaaagtaaattgattttagcacagatgatacagcaacaaggatgtaaagtagagatagagccatttttaaaagaaataaaacaaattccggatattttgattaataataaatatgttattgagctacagtattcgccaattccttataaacagattcttcaacgaacggaaggtttaaagaaaatgggatataaagtaagttggttattaaatgatgttgattattgtcataataaagtgaagttcaatcattttcaaagtatgtttattaatccaatcactcgaaaacttcatacgttcaatttagagaaaaaacaaataattatgtttcaacaaatacaatatttaggcgggcacaaatatgtcgctgaaaaaaagaatgccaaaattagtgagttgtttaatgaggcgccttgtgattatcatgctgtttataaattatcaaagttcgcaattaatcaatatatcaaatattgtcgctggcaaaattctgttttagaacccactttaagtgcaatgtatcagttacagttaactgatcacgaagtagtgcacaattatggttatatttttccagagcaaatttatattgaaaatcatccaattgagtggcaattacaagttgatttatggttaaagaatggaaaaagcaaattagtaagtgacaatcttaattattttaaactgaaaaagtttattgttgctctagaaagtaaaacagcaattatagaaaaacttattaacaattatttaaatattagttcagatagaggtaatgacgtgcaaattttgttctaaaatgagaaaattatatcaattatattttattaggaggtttactacatatgagtcaacaattatcgagagaagaacaggaacgtaaatatcctgaatatacatgggacttaacaacaattttcaaagatgatgaagcttttgaggctgcatttaaagaagttgaaaatgagttaggcaaagaagaacaatttaaaggacacattggtgatagtgctgagacattatacaatgcgttagaattagaagatacattaggtactaaattagaaaaagtatatgtatacgcgcatctaaaacaagaccaagatacaacgaacgacaagtatactggtatggagtcaagagcacatcaattaattattaaatttagctcggcatggagtttcttagtgccagagattttacaaattgatgaagataaaattcaatcatttgtaaattcatatgataaattacaaaaattcgcatttgatttgaagttgattaatgaaaaacgtcctcatattttagatgctgaaacggaaaagttattaacagaagcgcaggacgcgttatcaacgccatcaaatgtatacggtatgtttagcaacgctgatttagtatttgaagatgcgattgataaagatgaaaatgcacacccgttaacacaaggtacatttattaagtatttagaatcagatgatcgcaaactaagagaaagtgcttttagaaatgtatataaagcatatggtgctcataataatacgcttggcgctacgctagcaggtgaagtgaagaaaaatgtatttaatgctcgtacacacaattacaaaactgcaagagaaaaagcattgagtaataatcatattccagaaaatgtatatgacaatctagtaaaaactgtacataaatatttaccattgctacatagatatactgaattgcgcaaagaattgctaggtttagatgacttgaaaatgtatgatttatatacaccattaattaaagatattaagtttgaaatgccttatgaagaagctaaagagtggatgctaaaagctttagaaccaatgggtgaagaatatttaaatgtagttaaagaaggcttaaacaatcgttgggtcgatgtctatgagaataaaggtaaacgttcaggtggctattcatcaggtgcacatttaactaatccatttattctacttaactggtctaatactatttcagacttatacacattagttcatgaatttggacattcagcacatagttacttcagtagaaaattccaaccgtcaaattctagtgactacactatttttgtcgctgaagtagcatcaacttgtaacgaagcacttttaagtgattatatggataaacatcttgatgatgaaaaacgcttattattattaaaccaagaattagaacgtttcagagctacattattccgacaaacaatgttcgcagaatttgagcataaaattcatgccattgaagaagcaggtgaaccattaacgccaactagaatgaatgaagaatatgccaaattaaataaattatacttcggtgattctgtagaaactgatgaagatattagtaaggaatggtcacgtattccacacttctatatgaattattatgtatatcaatacgcaactggttacagtgcagctcaaagcttaagtcatcaaattttaacagaaggtaagccagcagtagatagatatattaatgaattcttgaaaaaaggtagctcaaattatccaattgagatattaaaaaatgctggtgtagatatgacaacacctgaaccaattgaacaagcttgtgaagtttttgaacaaaaattgaacgcttttgaaaaattaatgaaagcttagcactgttgtattcgcttacattatgaacagattgtgacaatttaaattaagtactattaaaaggttgaaatgggagagatagcgtgttatattatgaacatgaaattaatcacataacaaacatacccctttgtttgaagtgaaaaatttctcccatcccctttgtttagcgtcgtgtattcagacacgacgtttttttatgttcttttttaataagagggaagtgaagttgtataaaaatgtattaaatatgcactttttatacattaacgattaatatatgtctattatgtaccaaattcataatttgtataattttcgaactggttaaattcgaaaaacatcactaatatatttagatcgatgcgtaacattacgttctaataatttaatgttgcaaaattaagagtcaataaaaagacctcgttacatttatggtgtacgaggtctttaatttatttattttgatttgattttaggcattttagatttccagaaatcgccatctggatatttaagtttttcaattttttgttgaatagctaacttctttaactctttgtttaaaagtttttctggccattcataaatagtaagtaattcttccatcgttacaagttgttgttgctgtatataagtttctaatttaggaggaagattcttttcgataggtttacccatcaattcattaattatataagtatagatgtgatatgggtataatccttcgacttttaaaccttcttcatgaacatcttcactaaagaaaacgagagaaggggcttgttcgatttccatttctcttgcaatatgcaaatcaattttcaagctttcggttaatttacttttttgtaagtcgtctttaaatacttctaaatcaatacctgcattttgaatacagtcacaaatcattgattctgtaataatatctcttttaggtatgatttcattttgcattaaatgtataaatcgttcggcacgtaaacgaccttgtaactcagctgctttataagctagggcgatgttatcaaagttggatgtactttgagcttggcatttcgttaatacttttaacgaaggatttaatatatgtctgatacgtatatattgattatattcaattcttaatttggataagattgctgataatttgaagcaatcggagctaaatggatcgaaaaatgaataaatttcgattttacttacaggtgatagattaatatcttcacgactcttattttccattattcgtaattctccagccatgtttattcacctacaattaattttaggaattcaccatatgattagcagttaatcttaagcgctcaaataaataatctccaacaccttgtggaaacgcagcgcgattaattgctgtctgcatattttctaaccatgcatctctttcaaattcagtgattgtaaacgccatatgtctttttcttagcataggatgtccgtgttcttcggtataaatgtttggaccgcccaaaaactgtgttaaaaattgtttttgtttacgacttgtttctgcaaaatctcctggaaacaggtgattaagtcgttcatccttttctacaagggtgtaaaaataatcaatcatatcgtataacgcttctttaccaatgatgtcatatggtgttgttgtcatttaatcacccattttcaaaaatttactgttacgaacttaagttaatatataactaatataacatgattttaaacatttgaaagaaatatgcatatttgccaatttaatttatattgtttgaaagtgtttcttttttcttaaaaaaacgttgaactttatttaaaggttgatgatgttcgaggtttagttcatttaataaagattggaacttttctaaaccttgattatagtctttaacttcgaactctaactcataatccgtagtgtcgaaatactcacttttatctaaaacaagtaaatcacctttatatttagtttcttggcgatatgtcgttaatgcgccaagtattgataaagttgtatcctttacaccaaactgttcaactataatttgacgaatgtcatctggaagattgtcgtttgaaataatcaagttcatctctggtttaatgtcgacgatatagttgtattctaatagaccaacctttgctggtgtctttaaagtcatttcatattgattgtctttaactcttatgcgtagtgcagagcgatgttcctttaatttgaaatcgggtgtatcaatatagtaattgacttgcttaaaaagcacactgtctttaaaatatttctcttgcaatttattatagattgatgcagttatcatttgtttaaattctatttcatgatttgttgccatgatatgtatacacctcgtatcaaattcaatttatcttaactatattatgaatgacaaagttgaattttaaaagtaatttcctttatctattatcaatgttaatttgaccattaaaaatagtgttcgtaagtgttttgtattattgaattgtgttaaaatgttatggaataagaggaggattaagcatgcgtttatatattaatgaaattaaaattaaagatgacatactttattgttatacagaagattctattaaaggattatctgaagtaggacaaatgctcgttgatagtgataattatgcctttgcgtatacattagatgatggtaaagcgtatgcttatctcattttcgtacaagaaacatggacgatgttgcatgaaaacatgactaaaaaaattattatcaatgatgaactagaattgactgaattccaccaagaacttacttatattttagacaacataaaaggaaataataattatggtaaggaatttgttgcaaccgttgaagaaacattcgacattgaataaagcggggtgaagcactatgaatcaatgggatcagttcttaacaccttataagcaagcggttgatgagttgaaagtgaaacttaaaggcatgcgcaaacaatatgaagttggtgaacaagcgtcgccaatagaatttgttactggtcgtgttaaaccaatcgctagtattatagataaggcaaacaaacgacaaataccatttgataggttaagagaagaaatgtacgatatcgctggtttaagaatgatgtgccaatttgttgaagatattgatgttgtcgtcaatattttaagacaaagaaaagattttaaagtaattgaagaacgagattatattcgtaacactaaagaaagtggttaccgctcgtatcatgtcattattgaatatccaatcgaaacattacaaggccaaaagtttatattggctgagattcagattcgtacattagcaatgaatttctgggcaacgattgaacatactttacgatataaatatgatggtgcttatccggatgaaattcaacatcgtttggaaagagcggcagaagcagcgtatttacttgatgaagagatgtctgaaattaaagatgaaattcaggaagctcaaaaatattacacgcaaaaacgttctaaaaaacatgaaaatgattaacgaggtgttataaatcatgcgttatacaattttaactaaaggtgactccaagtctaatgccttaaagcataaaatgatgaactatatgaaagattttcgcatgattgaggatagtgaaaatcctgaaattgttatttcagttggtggtgatggtacattactacaagcattccatcagtatagccacatgttatcaaaagtggcatttgttggtgttcatacaggtcatttaggattttatgcggattggttacctcatgaagttgaaaaattaatcatcgaaattaataattcagagtttcaggtcattgaatatccattgcttgaaattattatgagatacaacgacaacggctatgaaacaaggtatttagcattaaatgaagcaacgatgaaaactgaaaatggctcaacacttgttgtggatgttaacttaagagggaaacactttgagcgatttagaggcgatggattatgtgtatcaacaccttcgggttcaacggcttataacaaagcgctaggtggcgcacttatacatccttcacttgaagcaatgcaaattacagaaattgcctcaataaataatcgtgtgtttagaacggtaggatcaccacttgtattaccaaagcatcatacatgtttaatatcaccagttaatcatgataccattagaatgacgatagatcatgttagtatcaaacataaaaatgttaattcaatacaataccgtgtagcaaatgaaaaagtgaggtttgcacgttttagaccattcccattctggaaacgtgtacacgattctttcatatcaagtgatgaagaacgatgaaatttaagtatcatatatcacaacaagaaactgttaaaacttttttagcacgacatgatttttctaagaagacagtgagcgccattaaaaataatggcgctttaattgttaatgatgaaccagtcacagtgcgtaagcaattaatgccaaatgatatattagaaattcatttgccgcgagaaataccgagtgttaatttaataccttatgctcgtaagctagaagtattgtatgaagatgcttttgtcatcatagttactaaaccaaacaatcaaaattgtacgccttcgagagaacatcctcatgaaagtttaatcgaacaagtactatatcattgtcaagaacatggtgaaaatattaacccacatattgttacgcgtctagatcgtaatacaactggtattgtgatattcgctaaatatggacacatccatcatttattttctaaagtaaacttgaaaaaaatatatacttgccttgtatatggtaaaacccatacatttggtattattgaagctaatattagacggtcaaaggatagtattataactagagaagttgcctcggatggtaaatacgctaaaacatcttatgaagtaataaatcaaaatgataaatatagtttgtgtaaagttcatttgcatacgggacgtacacatcaaattcgtgtacattttcaacatattgggcatccaattgtgggagattctttgtatgatggttttcatgacaaaattcatggtcaagtactgcaatgtacgcaaatatattttgttcatccaatcaataagaacaatatttatattacaattgattataagcaattacttaaattattcaatcaactctaattcacacagggggtgtaagtatgtcaatgaacacagatgaaaaagagcgtgttcaagaggaattatatgatgagacattattagatcaatacttagaaaatgatgatattgatcaatttagagatgaatttctagcattacacacatatgaacaaagtgagtattttgaagatactaccgatgaaaatagacaaaagatttttcaatatttatcacctgaagaggttgcaaatttctttgatcaattagatattgatgacgatgaatatgagttgctatttgataagatgaatgcgacatacgctagtcacatattagaagaaatgtcatacgataatgcagtagatattttaaatgagttgactaaaccaaaagttgctagtcttttaacattgatgaataaagatgacgcgaatgaaatcaaagcattacttcactatgatgaggatacggccggcggtattatgacgacggagtatttatcacttaaagcgcatacgcctgttaaagaagcgttattattggtcaaagcacaagcgccagacgcagaaacaatatatgttatctttgttgttgatgatgatggtaaattagtaggtgttttatcgctaagagatttaattgtagctgaaaatgatgcgtatattgaagatattatgaacgaacgtgtcattagtgtgaatgtagcagacgaccaagaagatgttgctcaagttatgagagactatgatttcatggctgtacctgttatagattaccaagaccatttgctggggatcatcacgattgatgatattttagacgttatggatgaagaggctagtgaagactactctcgtttagccggggtttcagatatcgattcgactaatgattcaatcattaaaacagcattaaagcgtttaccatggttgattattttaacatttttaggaatgattactgcgacaattttagggagattcgaaaaaacattagaaaatgtagcgctactcgcagcgtttattcctattattagtggtatgtcaggaaattcaggtacacaatctttagccgtttcagttcgtaacattacgacaggggaaattaatgagcaaagtaaatttagaattgcattaagagaagcgggaagtggtgtattatcgggtgttgtatgttcaacaatattatttacaattattgttgcaatatatcatcagccacttttagcattaattgttgcaggaagtttaacttgtgcgatgacggtggggacgtttgtaggttcgatgattccattattgatgaataaattgaatatcgatccagcagtggctagtggaccatttattacaacaattaatgatattattagtatgttgatttattttggtttagctacatcatttatggcttacttaatttaaggaggagttatggagtttttatctttagttattgttgttttagcagcgtttttaactccaataattgtcaatcgattaaatattaatttcttgccagttgttgttgcagaaattttgatgggaattgtgattggaaattcatttctaaatatagtagaaagggattcaattctaaatattttatcaacgttaggctttatctttttaatgtttttaagtggtttagaaattgattttaaagcttttaaaaaagataaacgcgcacgtcaaggacaaaatgatgatgaatcctcaattccagggcatcttaatctagcgttaactgtatttgcatttattatgattatttcgattcttttagcgtatgtatttaaatggcttggattagtggatgatgtgttattaatggtcattatcatttcaactatttccttaggcgtagttgttccaactttaaaagaaatgaatattatgagaacaactatagggcaatttatcctattagtagcagtgcttgcggatttagtaactatgattttattaacggtctatggtgcaatcaatggtcaaggcggcagtacaatatggttaataggtatattagttgttttcacagcaatttcatatattttaggtgttcaatttaaaagaatgtcatttttacaaaaattgatggatggtacgacgcaaatcggtattcgtgcggtgtttgcattaataatattattagtagccctagcagagggagttggcgcagaaaatatattaggtgcattcttagcaggtgtcgttgtttcattattaaatccagatgaagaaatggttgaaaagttagactcatttggttacgggttttttattcctattttcttcataatggttggtgtagatttaaacataccttcattaattaaagaaccgaaattactaattatcataccgattttaatcgttgcatttatcatttcaaaattaattccagtcatgtttattcgacgttggtttgatatgaaaacaacgattgcatcagcatttttattaacatcaacattatcgctcgtgatagctgcagccaaaatttcagaaagattaaatgctatttcagctgaaacgtcaggtatattaattttaagcgcagtcattacatgtgtattcgttccgattattttcaaaaaactgtttccagttccagatgagtttaaccgtaaaattgaagttagtttaattggtaaaaatcaattaacgattcctatagcgcaaaatttaacatctcagttatatgacgtgacattatattatcgcaaagacttgagtgatcgtcgtcaattgtcggatgatatcacgatgatagaaattgctgattatgaacaagatgttttagaacgactaggtctgtttgaccgagacatagttgtttgtgccacgaatgacgatgatattaaccgaaaagttgctaaattagccaaaacacatcaagttgagcgtgtcatttgcagacttgaaagcacaacggacgatacagagttagttgattcaggtattgaaattttcagtagctacttaagtaataaaatcttattaaaaggtttaattgaaacacctaacatgttgaatttattaagtaatgttgaaacgtcactatatgaaattcaaatgttaaattataaatatgaaaatattcaattacgtaatttcccattcggaggagacatcatcttcgtgcgtattatccgtaataatgagtcgattgttccgcatggagatacacaattgcgatatggtgatcgcttaattgttaccggtgctaaagaatacgttgatgaattgaagcaagagttagaattttatttttaacaataatgatattaaaatgcagacgtattttagtacgacgtaaaattaatgattttaaaatgcttgtatgtatatgattttgataaatacatgctttttacgtaaatcaagtttgatacagaaaggactaaatcaaacatttatcgttgtaatacgtttaaataactttattaaaaagtcataatagtgttaaaatgtattgacgaataaaaagttagttaaaactgggattagatattctatccgttaaattaattattataaggagttatcttacatgttaaatcttgaaaacaaaacatatgtcatcatgggaatcgctaataagcgtagtattgcttttggtgtcgctaaagttttagatcaattaggtgctaaattagtatttacttaccgtaaagaacgtagccgtaaagagcttgaaaaattattagaacaattaaatcaaccagaagcgcacttatatcaaattgatgttcaaagcgatgaagaagttattaatggttttgagcaaattggtaaagatgttggcaatatcgatggtgtatatcattcaatcgcatttgctaatatggaagacttacggggacgtttttctgaaacttcacgtgaaggtttcttgttagctcaagacattagttcttactcactaactatcgttgctcatgaagctaaaaaattaatgccagaaggtggtagcattgttgcaacaacatatttaggtggcgaattcgcagttcaaaactataatgtgatgggtgttgctaaagcgagtttagaagcaaatgttaaatatttagcattagacttaggtccagataatattcgcgttaatgcaatttcagctggtccaatccgtacattaagtgcaaaaggtgtgggtggtttcaatacaattcttaaagaaatcgaagagcgtgcacctttaaaacgtaatgttgatcaagtagaagtaggtaaaacagcggcttacttattaagtgatttatcaagtggcgttacaggtgaaaatattcatgtagatagcggattccacgcaattaaataatatcattcaacagctttgttcacgttattatatatgtgagcaaagctttttgcttttataataatcggactgatggaaaattatttgatatttcatctgactgatttttttatgcacaaaaaaatcgcctcaaaagctgtagtttcaacttttgaggcgatagtatcttatattattaaaagacatccacagaattagtccttaacattactgtttgctttatcaataatgcgttggcggtatttaaaaatattactaacaaccgttttaagtacagcatataatggcactgcaatcagaactaatgtaaagccacctaaatctcctgctgctaaaataacaacgataattgttaaaggatggatacttaaagatttacccattacatttggtgtaatgatattaccttcaagttggtgtgcaattaatgtaatgatacaaacccatataaatgtagtaggactatctataataccgagtattgctgcaggtgcaaatgataaccatgaacctaagaaaggaattaagtttgcgacaccagcaaatagtactaataaaggaatatatggtaagtcaataattgaataaccgatatataagaatatacctaaaataacactgacagttacttgaccttgaatgtaagattttaatgtaaagtttaaatcagttaataaatctacgaaaaatactttacgttcacctttgaaaaatttagcaacagctgggataaatttttcatggtcttttaacatataaattaagaagaatggaaccataatcaataagaagatggttgaaattaatgatgtaatgtactgtaatgaattagataaaatattagtaacgccatcacccattgatttaaccatatttgtaattctacttgttacatcttcaggtaatttatccatttgagctagtgcgaatttaataatttgctctgtttctttttgtaaggcaggtgtttgactaattaaattgttgatatttgaaatgatgattggtgcaacaaacgcaacaattaagccgataatagcaaacaaagctaacatgattgttgttatactagcccatcttggaaaaccgactttttcaagtaagttttgaaaaggtagacagatataaaataaaaaaccactaattaaaaatggaagaaatacagaaccgatgattgtagctattggagtaaatacttcgtgcacttccataaatagtttgatgagaatgaacagcataatcagagcgatgccagttcggaaccaaaccttgtttaacataaacgatgttcctcctatttttctaaacttagttattatttagtatatcctaaatagcagtgcttaaaaaggttaatattttttaaatatacttaaattaaccatttactttctattttaagatatttactttcaatagtttgtgagacttttcaatgactcgtaagtctgcaaatggatcaaacagtaccaatttatatgaataacttattttaatattaaacgtgtttaaataatgaaatgatcatattaatatttataagaatattctgaaaaatatattgaagtgtctcgtgcttaatcgtataatatttttatgtttaaacaatagggggaatcttatgattgaaaaattagtaacctttttaaatgaggttgtttggagtaagccattagtttatggtttgctaattactggtgtgctatttacattgcgtatgcgattttttcaagttagacattttaaagaaatgattcgattaatgtttcaaggagagaagtctccaaatggtatttcaagttttcaagcgatagccatgtctttagcaggcagggttggtacaggtaatattgtcggtgtatctactgcaatatttataggaggacctggtgcagtattttggatgtggattactgcatttttaggtgcaagtagtgcttttattgaatctacacttggtcaaatattcaagagagttgaaaataatgaataccgtggtggaccagcgtattatatagaatatggtattggtggtaaatttggtaaaatttacggaattatctttgctattgttacgattatctcagtaggtctattgcttcctggtgtgcaatctaacgctatagcaagttctatgcacaatgcgattcatgttccacaatggttaatgggtggtattgttgtagttattttgggattaattatttttggtggtgtacgtagtattgccaatgttgcaacagccgttgtaccatttatggcaattatttacatactaatggctgtcattatcatttgtatcaatatacaagaagtgccagcgttatttgcattaattttcaaatcagcatttggattacaatctgcttttggtggtatcgttggcgcaatgatagagattggtgttaaacgtggattatactcaaatgaggctggtcaaggtacaggtccacacgcagcagcggcagcagaagtatcacatccaagtaaacaaggtctagtacaagcattttcagtttatattgatacattatttgtatgtactgcaactgctctgattatacttatttctggtacatataatgtgactgatggtacggttaatgcgaatggcacaccgcatttaattaaagacggtgggatttatgttgaaaatgcaacaggtaaagattattcaggtactgcgatgtatgcacaagccggcattgataaagcgttccatggcagtggttatcaatttgatcctactttctctggcgtaggttcgtactttattgcatttgctttattcttctttgcatttactacaattttgtcgtactactacattacagaaacaaatgttgcttatttaacgcgtaatcaaaataatcaagtttcatcggtatttattaatattgctcgtgtgattattttgttcgctacattttacggtgcagttaaaacagctgatgtagcatgggcattcggtgatttaggtgtaggtctaatggcttggttaaatatcattgcgatttggattttacataagcctgccgtaaatgctttaaaagattatgaaattcaaaagaaacgtttaggcagcggttataatgcagtttatcaacctgatccgaataaattacctaatgctgtcttttggttgaagacatatccagaacgtttaaaacaagcacgtgccaaaaagtagtcaacttttagttatggtatatgtagtgatcatttgataaaaaagaaaaagtattgagaattttaggtgctcagaaatttgaattttaaaatatagtgtctcttggtacaataataatacaattactagggggcacttttttatgttggaatttaaagctggaaagattaataaacatgttttatatagtgatattttaaatagagatgtcacactaagtatttatttgccagaatcttataatcaacttgttaaatataatgtcattctttgctttgacggattagattttttacgtttcgggagaatacaacgtacatatgaatcgttaatcaaagaagcgcgtattgatgatgcgatcattgtcggattccattatgaagacgttgataagcgtagagaggaatttcatccacaaggaagtcgttctcatttaactattcaatcagtcggtaaagaaatattgccatttattgactcgacgttttctacactgaaagtaggtaatgcaaggttattagtaggagatagtttagcgggtagtattgccttattaacggcgttgacctatccaacgatttttagtcgtgtagcaatgttaagtccacattcagatgaaaaagtattagataagctaaatcaatgtgctaataaagaacaattgacaatttggcatgtcattggtctagatgaaaaagatttcactttaccaacaaatggtaagcgtgccgatttcttaacaccgaatagagaattagctgaacaaattaagaaatataatataacttattattacgatgaatttgaaggtggtcaccaatggaaagattggaaaccattgctgtcagatatattattgtatttttttagtaatcagtcaccggatcaattatatgagtaatatgttcttatataactgattattgtagtggttttatcttcaaaagaggggcaattttagggcacttaggtattatattaagagaaaagcatattcctgcaataacaacggataaagagcttcaagaaggtgaaatgtatagaatagtgaaggggggaatttacagtgaataataagcttatatatacctcttatgatggtgataacatactattgatagatagttttattaaacttgttattgattttaaatatattccaataaatccaactaaatcattaggatattatatatctacatcgattcatgacaatgacaaaggtgagtgtttaagagactgcttgtctttggaaatgatttgtgatgaactttgggtattcatagacaataataaatatattccagaaggagttcggttagaaatagcctcatggttaaaatataaatcctctccagttaagtatataagcataccttctttattagagaattcgagtataaatgacgatttatttttagactttgatgattcaaatatacttaaagaaaaggaaatttccgaactagtaccgaaaaaaagtgagttaagacctgtaaattgtattaatatactaccggaacaccataaatatatagactggataaagtatcatttattttataacaaattcgtaccattggattatttaagtataaagccatatatttattttgataatatagaacattataaaagtgagttatcgctattgaatgaacgatgtaataacatttctgttatgccatattatgtgagtgaagataattttaatttatctttttcagaatgcaaaatacctaaatatattaagaaagattgggctataacaacaatggagaataaaaattaacatggatatatcattaaatttcaatcattatattgatttaaaaaagagtattaaaaatttatgcttaatgaaaaagtttgagccctatgtaaccaatgaaaattatgattttattgaaatgcctttggtagtagatggaaattatgtgctcttaaaaatttatcaagaaaaagacgctttaattaaacttcattatcaggaagtattaaactctaatcgaaaaagtgtaatacaagaaagtgatatagttagaatttcacgaagcatacttaatgaagctcttgatatcaatagtaatataaaatataaatctgatacttttggattaactattatatccgatgcagataattacacaacattaatacggactatacttgctcagcaagtgagcatagaacaagccaataaactatttttattatttattaatacttatggtgaaatttttgaactaaataataaagaatacacttttttaaattgggataaaatattcagtcgaatatataaagaacaaaaagttttagtaggtacgactaataatagaaagcaggctatcataactcttgctgaattacatataaaaaacggcttaagagaaaatgttttacaagttatttcaagtataaaaggtataggttcttggacagtgcaaatgtttatgctatttcaatttcctcacgtagcttttgaaaatattcctgtagcagacataggattgcacagggccatagaaaaaaatcatgatcttccacataaatcgattgataaaagtaagggagaatcttacttccaaaacatgaaatctatagatgtgtttaaatattggtatatatacatggttgaatagatgtttaagcagtttgttgtacagtaaaaataaaacctattaaatataaggattgcttaatctcttttctaattattcaactcccgatgtaatattctgtaaattactttacagaatatgtttactttacgtactttttaaatgaaaggtaagagtagataaactttttaaagacctatttctgaaataatagaagatactactttatttatataaatgttggattatcttaaataggcagtatagtgactatttatcatgccagttctatcattttttttaaaggaattattaagatgattatcacattactaccggaaaggtttaaggtaattgttgtagaaaattctcaatatattttttcagcgatacatttttatatctataaaccaattacatacgaatgttgtatggagttctttaactaaaaataatatacaactgttactagaaatcaatattttttgtttattatagaatcctatcacaacaagcttaaatgaacattgtaatagaaacgcactgaattataaaacagaattaaaattatttatagggttatctaggctgtctagataaatttgacaatgctatagttaaatatatttataaaagattttactgtttaatttaatttaaatttgtcgaaattgcaaaagatgtataatgaattatttttaatgtaacggttttcaaagaaatttgatataatagcaataggttaaacaaaggaggaattcagatgattttaggattagcattaattccatcaaagtcatttcaagaagcggtggattcttaccgtaaaagatatgataaacagtattcacgaattaaaccacatgtgacaattaaagcaccatttgaaattgaagatggtgatttagattctgtcattgaacaggttagagctcgtattaatggtataccagcagtagaagttcatgctacaaaagcttctagcttcaaaccaacgaacaatgtgatttactttaaagttgcgaagacggacgacttagaagaattgtttaatcgctttaatggagaagatttctatggagaagctgaacatgtttttgtgccacactttacaatagcacaaggactatctagccaagaattcgaagatatttttggtcaagtagcattagctggggtagaccataaagaaattatcgatgaattaactttgttacgttttgacgatgacgaagataaatggaaagttattgaaacgtttaaattagcttaagtaacataatagtattgttaatcgtagtatgtttgaattaataagaaaatggtcatttttattgaatgtaataaaaatgaccattttctttattttaaaatacgttttaaccttacttagctttttctctatttgctataaagtagcttccataaaatacagctaagactaaaaagattaatgccgagaaataaaatgtattgtttaaattgttggtaaattgtgtaattaatccgccaaataatggcccgatcattgagccgaatccttggatactattaaaaacaccccaagtttcttcttgttcatctgatttgataaatcgtgccataaaggtattccatgctggtaataagatgccatacattagaccgatagctaaagcgataatccacacgatgtgaatattaacaatcatagatagagtaaaaattaatatcatgtataaaataaatccgcttagaataacaccatacataaagtttctgctgcggttatctattagtttcgataaaaatagcatcgaaactgcacagccgataccaccaataatgattgcaacagtatattcaattgtgcttacgttaataaccttagtagcatatgttggtaatataggaactagtgcagcaattgcggcaccttgtaaaagaataccagggaacaacaataaatggcgctttgtcacatcaacaatttgtctcaattgagctttaactggacgagtattataatttgttaactttacatcgacaaaataatataatatccaagcaattaaaacgactaaagacatcatgaaggcaaagcgtgttgggtgcactttgataagtagattcataaaaaccatacctaccaataggcctaacaaccatgaaaaataaacatagcccatttgtttgccacgtttatcttcttcaacactggataacataatgacccaaataggactaactgcaataccgagcatcatagcactaaatatgattacaaaaggtgatgctggaaaccaaataactaaaaataaacttgtaaatgctaaaataaatccagtcgttaaaacgatttttgtgccgaattttttcagtaaaaatcctataacaaagtttgtagatgcatcagcaataaaatgtattgaaaatgctagagacgttattgctacagcaatggatgttactgttggcaagaaattaatatagcttaggatatacatgcctctcgcaaattccattaaaaataagataataagcattaaaatgaaatttttatgattagcgtaattatttaacgaagaatcttgcatataaaggaacctttccataaatctcttgtggttgtgatgaatgaccgattaaatcaagtaagtcttgacatattgtctgtgtagcatacttaattttatcttgttccattgtactaatcatgttagttaattgctcattaccattcgttaaactagctacaatttttattgcttcttctggagtatcagcgattttaccaaaacctttttcttcaaagtaaagggcattttcaagctcttgaccaggtgcaggatttaggaaaatcattggaatacaacgggcgaaaccttcagttattgtgataccaccaggtttcgtaatcataagttgacttgatgccatccattcattcatgtgtttggtataacctagaatcaatacattctcgttagatttaaacttagctgttaaagaacgctttagctctttgctcttaccacaaatcataactacttgtgcatttgcacttttcgctaatatatcagtgatcatcgtgtcaaagcctttagatacaccaaatgcaccagctgacattaaaatagtttgcttatctggatctaagttgttgtctattaaccactgcttttgattaataggtgtttcaaatttgttatcaataggaatacctgtcactttaactgttgaaggatcaatacctacgtctataaagtcttgtttcgtttcttttgttgccacataatatcttgttgaatacggcgtaatccagtttttatgtaagcgatagtctgtcatcactgtagcaactggaatattaatgttaaattgctcagttagtaccgacataactggtgtaggaaacgttaataatattaaatccggcttttcttttatcaataaatttattaatttattaagtccatagtatttgtagaaacatttgtctagtttatctgggcggctgtaataaaaccctttgtacatatttctaaaatatttaaagctattgatataccattttttacaaatagaagtcaaaattgggtgagcttccataaataaatcgtgctcaatgacgcttaaatggtctagattcatatcattaagttgattaacgatactctgtgtaacttgcatatgaccgttaccgaaagagccagtaataatcaatatctttttattttgagtaaccattaatagccaccctccgttagtttgaaaattttatttaagtgtaacttattttacggcattataaaagaaataaagacgcaaagtcgttacatttatagcattttaatcaatagatgaattgatacaaaataaaacgttattttattaagcaatttattgttctatgttttatttgtatatttaaaattatccagtatacaattatagcatatttttggaaacaattatgatattataccatgttacaagatggttttaataatttaagatgaaccataattgtgaaactaattcataataccttatgttttatttttaatagtagaaattagaaaatgctgattagtaggatataacagtgaaattataaatttattaacatcaacaaaacgtgtataataaacatattgtagaaaaaggagcggttcagtttggatgcaagtacgttgtttaagaaagtaaaagtaaagcgtgtattgggttctttagaacaacaaatagatgatatcactactgattcacgtacagcgagagaaggtagcatttttgtcgcttcagttggatatactgtagacagtcataagttctgtcaaagtgtagctgatcaagggtgtaagttggtagtggtcaataaagaacaatcattatcagctaacgtaacacaagtggttgtgccggacacattaagagtagctagtattctagcacacacattatttgattatccgagtcatcagttagtgacatttggtgtaacgggtacaaatggtaaaacctctattgcgacgatgattcatttaattcaaagaaagttacaaaaaaatagtgcatatttaggaactaatggtttccaaattaatgaaacaaagacaaaaggtgcaaatacgacaccagaaacagtttctttgactaagaaaattaaagaagcagttgatgcaggcgctgaatccatgacattagaagtatcgagccatggcttagtattaggacgactgcgaggcgttgaatttgacgttgcaatattttcaaatttaacacaagaccatttagattttcatggcacaatggaagcgtacggacacgcgaagtctttattgtttagtcaattaggtgaagatttgtcgaaagaaaagtatgtcgtgttaaacaatgacgattcattttctgagtatttaagaacagtgacgccttatgaagtatttagttatggaattgatgaggaagcccaatttatggctgaaaatattcaagaatctttacaaggtgtcagctttgattttgtaacgccttttggaacttaccaagtaaaatcgccttatgttggtaagtttaatatttctaatattatggcagcaatgattgcggtgtggagtaaaggtacatctttagaaacgattattaaagctgttgaaaatttagaacctgttgaaggacgattagaagttttagatccttcgttacctattgatttaattatcgattatgcacatacagctgatggtatgaacaaattaatcgatgcagtacagccttttgtaaagcaaaagttgatatttttagttggtatggcaggcgaacgtgatttaactaaaacgcctgaaatggggcgagttgcctgtcgtgcagattatgtcattttcacaccggataatccggcaaatgatgacccgaaaatgttaacagcagaattagccaaaggtgcaacacatcaaaactatatagaatttgatgatcgtgcagaagggataaaacatgcaattgacatagctgagcctggggatactgtcgttttagcatcaaaaggaagagaaccatatcaaatcatgccaggacatattaaggtgccacatcgagatgatttaattggccttgaagcagcttacaaaaagttcggtggtggccctgttggtcaataaaagacttcttgatgaaggtaaaactattgatgtttatttattcgaagcattaaatgaccagataatcattgctataccagattggttttggtcatatcagatggcaatgacattaaatgaagaaacttgttttgaagcaatactcatgcaattgtttgtttttaaagaagaggaagaggcagaatcgattgcatcacaactaacagattggatagaaacatataaaaaggagaaagactaatgaacttaaagcaagaagttgagtctagaaagacttttgcgattatttcacatcccgatgcagggaaaacaacgttaactgaaaaactattgtacttcagtggtgccattcgtgaagcgggtacagttaaagggaagaagactggtaaatttgcgacaagtgactggatgaaagttgaacaagagcgtggtatttctgtaacaagttcagtaatgcaatttgattacgatgattataaaatcaatatcttagatacaccaggacatgaagacttttcagaagatacgtatagaacattaatggcagttgacagtgctgtcatggtcatagactgtgcaaaaggtattgaaccacaaaccttgaagttatttaaagtttgtaaaatgcgtggtattccaatttttacattcattaataaattagaccgagtaggtaaagaaccatttgaattattagatgaaatcgaagagacattaaatattgaaacataccctatgaattggccaattggtatgggacaaagtttctttggcatcattgatagaaagtctaaaacaattgaaccatttagagatgaagaaaatatattacatttgaatgatgattttgagttggaagaagatcatgcaattacaaatgatagtgcttttgaacaagcaattgaagaattaatgttggttgaagaagcgggtgaagcctttgataatgacgcgctgttgagtggagacttaacacctgtatttttcggttcagctttagctaactttggtgtacaaaatttcttgaatgcatatgttgattttgcgccaatgccaaatgcgagacaaacaaaagaagaggttgaagtaagcccgtttgatgattcattttcaggatttatctttaaaattcaagccaacatggaccctaaacaccgtgatagaattgcctttatgcgtgtcgttagtggtgcatttgaacgtggtatggatgtcactttgcaacgtactaataaaaagcaaaagatcacacgttcaacgtcatttatggcagacgataaagaaactgtgaatcatgctgtagcaggcgatatcattggactatatgatacaggtaattatcaaattggagatactttagttggtggaaaacaaacctacagtttccaagatttaccacaatttacgccagaaatttttatgaaagtttctgctaaaaacgtcatgaaacagaagcatttccataaaggtattgaacaattagttcaagaaggtgcgattcaatactataaaacattacacacaaaccaaattattttaggtgctgttggtcagttacaatttgaagttttcgaacatagaatgaaaaacgaatataatgttgatgttgttatggagccagtaggccgtaaaattgcacgttggattgaaaatgaagaccaaattacagataagatgaacacatcaagatcgattttagtgaaagatagatatgacgatttagtattcttatttgaaaatgaatttgcaacaagatggttcgaagagaaattccctgaaattaaattgtatagtttactttaacggctcaattgtataatcgaatttgttacattaaaaataattgtttccttgaagaaaaataaattgtatattttaaaagaaaaaggtatactatgatgtatcaaatgaataacctatggcattttgtcagaggggagtaacttaagaatcatgaccgtataaatgattcgacactttatcgtcattacgaagatatcttccggtaaagtgggcaattaaaattgcttagtgagacctttgctatttatttagcataggtctttttgtttgtacttaacttatttatttaaaggagttgtacatgttaatggatccaagtttgatcttaccttatttatgggtacttgtcgttttagtatttttagaaggcttattagcagcagataacgcaatcgttatggctgtaatggttaagcacttaccacccgaacaacgtaaaaaagctttgttttacggtttgctaggtgcatttgtatttagatttttagcattattcttaattagtattatcgcgaacttttggtttattcaagctgcaggagcggtttacttaatttatatgtcaatcaaaaatctatggcagttctttaaacacccagaaattgaaagtcctgaagctggagatgatcatcattatgatgagtctggtgaagagattaaagcaagtaacaaatcattctggggaactgtgttgaaaatagaatttgcagatatcgcatttgccattgattctatgcttgctgctttagctattgctgtaacacttcctaaagttggtattcactttggtggtatggacttaggtcagttcgtagtcatgttcctaggtggaatgattggtgttattctaatgcgttatgcagcaacatggttcgtagagctattaaacaaatatccaggacttgaaggtgcagccttcgcgatcgttggttgggtaggtgttaagttagttgtcatggtattagcgcacccagacatcgctgtattgcctgagcacttcccacatggcgtattatggcaatctattttctggacggtactaattggattagtaattatcggttggttaggttcagttgttaaaaataaaaaatcgcataaataaatgatgtgaagcggacaatcttaatttagtttaaggttgtcctttttcatttaattaagtgatctatgaaaaatggattttgaagaatatgtatcaaaagatgcgatatagtattaagaaaatgtgccttttatatttagcattttttcaatagaaattatatagattttaaagcaaattaagtgttaatgtgtcataatgaaaagtgattttattgaatggagtggacattagtggatattggtaaaaaacatgtaattcctaaaagtcagtaccgacgtaagcgtcgtgaattcttccacaacgaagacagagaagaaaatttaaatcaacatcaagataaacaaaatatagataatacaacatcaaaaaaagcagataagcaaatacataaagattcaattgataagcacgaacgttttaaaaatagtttatcatcgcatttagaacagagaaaccgtgatgtgaatgagaacaaagctgaagaaagtaaaagtaatcagggtagtaagtcagcatataacaaagatcattatttaacagacgatgtatctaaaaaacaaaattcattagattcagtagaccaagatacagagaaatcaaaatattatgagcaaaatactgaagcgactttatcaactaattcaaccgataaagtagaatcaactgacatgagaaagctaagttcagataaaaacaaagttggtcatgaagagcaacatgtactttctaaaccttcagaacatgataaagagactagaattgattttgagtcttcaagaactgattcagacagctcgatgcagacagagaaaataaaaaaagacagttcagatggaaataaaagtagtaatctgaaatctgaagtaatatcagacaaatcaaattcagtaccaatattgtcggaatctgatgatgaagtaaataatcagaagccattaactttgccggaagaacagaaattgaaaaggcagcaaagtcaaaatgagcaaacaaaaacttatacatatggtgatagcgaacaaaatgacaagtctaatcatgaaaatgatttaagtcatcatacaccatcgataagtgatgataaagattacgttatgagagaagatcatattgttgacgataatcctgataatgatatcaatacaccatcattatcaaaaatagatgacgatcgaaaacttgatgaaaaaattcatgtcgaagataaacataaacaaaatgcagactcatctgaaacggtgggatatcaaagtcagtcaagtgcatctcatcgtagcactgaaaaaagaaatatggctattaatgaccatgataaattaaacggtcaaaaaccaaatacaaagacatcggcaaataataatcaaaaaaaggctacatcaaaattgaacaaagggcgcgctacaaataataattatagtgccattttgaaaaagttttggatgatgtattggcctaaattagttattctaatgggtattattattctaattgttattttgaatgccatttttaataatgtgaacaaaaatgatcgcatgaatgataataatgatgcagatgctcaaaaatatacgacaacgatgaaaaatgccaataacgcagttaaatcggtcgttacagttgaaaatgaaacatcaaaagattcatcattacctaaagataaagcatctcaagacgaagtaggatcaggtgttgtatataaaaaatctggagatacgttatatattgttacgaatgcacacgttgtcggtgataaagaaaatcaaaaaataactttctcgaataataaaagtgttgttgggaaagtgcttggtaaagataaatggtcagatttagctgttgttaaagcaacttcttcagacagttcagtgaaagagatagctattggagattcaaataatttagtgttaggagagccaatattagtcgtaggtaatccacttggtgtagactttaaaggcactgtgacagaaggtattatttcaggtctgaacagaaatgttccaattgatttcgataaagataataaatatgatatgttgatgaaagctttccaaattgatgcatcagtaaatccaggtaactcgggtggtgctgtcgtcaatagagaaggaaaattaattggtgtagttgcagctaaaattagtatgccaaacgttgaaaatatgtcatttgcaatacctgttaatgaagtacaaaagattgtaaaagaattagaaacaaaaggtaaaattgactatcccgatgtaggtgttaaaatgaagaatattgccagtctaaatagttttgaaagacaagcagttaaattgctaggaaaagttaagaacggtgttgttgtagatcaagttgacaacaatggtttagcagatcaatctggtctgaaaaaaggtgatgtaattactgaattagatggcaaacttttagaagatgatttacgctttaggcagattatatttagtcataaagatgacttgaaatcaattacagcgaagatttatagagatggtaaagaaaaagaaattaatattaaactaaaataatgttgaggtgaacaacgtgtcaatttttagccagtttttaaaaagatcaagccctcaacaaggtattgtattgtattatatcgtcgcaattgtcgttgcatttttattattaaacttaccgtatgttcataaaccaggtgtagaagtaaatccaattgacacattatttgttgccgtatccggaattagtgttactggattgtctccgataagtattgtcgatacctattctacatttggacaattaattatcctcgtgatattaaatattggtggaattggcgtcatggcaattggtacgatgttatgggtggtactaggtaaacatattggaattagagaacgtcagttaattatgttagataataacaaaaacacaatgagtggtaccgtcaaattgattattgatattgtaaaatcaatatttgtaatcgaactcgtaggagccatgttattagcattttacttttatcgagataatccagatttaaaatatgcaatcatgcaaggtgtttttgtttctatttctgccactaccaatggtggattagatattacaggtaagtcattaattccttatgcacatgattattttgtacaagcgatagttatatttttaataattttaggatcaatcggcttcccagtattattagaggttaaagcttacattcaaaatagggttactaattttagattttcattatttactaaaattacgacatcaacatatttattcctatttattgttggggtattagccattctattatttgaacataaccatgcgttcaaaggattaagttggcatcaatcgttattctattcgctgtttcaatcagcgactacaagaagtgcgggtcttcaaacaattgatgtgacaacactaagtgaccctacgaatattatcatgggtattttaatgtttataggttcttcgccaagttcggttggtggcggtattcgtacaacaactttcgctattttaattttgtttttaattaactttagtaataatgccgataaaacatccataaaagtatacaatagagaagtacacattatggatattcaacgttcatttgcagtatttacaatggcgacaattttaacatttttaggaatgctaattatatcagctactgaaaatggtaagcttacatttttacaagtattttttgaagtcatgtctgcatttggaacttgtggactatcgcttggtgtcacaagtgatattagtgatatttccaaggtcgtactaatggtactcatgtttataggacgtgttggcttaatatcatttatcattatgatagcaggacgtcgagaaccagataaattccattatccaaaagaacgtattcaaataggataatataatagcaatctaagtttagttaatgtagattttaactggaacttagattgcttttttagtttgtatttttaacttatattataagacgattggatttgaaaatggtaaactagtaacaatgagaggtgtaacatgatggaaaaaaatgaaaacattaatgtagagattttaactacgtcagatatgcatagtcatttcttaaatggtgattatggttcaaatatttatagagctggtacttatgttaaccaagtaagagcacaaaatcatcgcgtcattttattagatagtggcggaagtttagctggctcgttagcggcctattattatgctattgttgcaccttataaacgacatccaatgataaagttgatgaacagaatgcattatgatgctagcggtgtgagtccaagtgaattcaagtttggtttatcatttttaactcgttcaattgctttggcacgttttccatggttatcagcaaatattgaatacaatgttactaaggagccttatttttcaactccatattgtattaaacattttggtgacttaaaaattgctatcgtaggcgttacagcagatggtttaatggaaaatgagtattctgaaatggagcaagatgtatctattgaaaagacattagtggcatcaaaacgatggattagatatatccatgaagttgaagagccggattttttgattgtaatttatcatggtggattgaataaaattagtaatagcacgaaaaataaaaaggcaagttcgaatgaagctgaaaaattaatggaagaaattggtgttatagatttaatgattacagctcatcagcatcaaacaatagtaggtcaagatcatgaaacgtattatgttcaggctggtcaagatgcaaaagagcttgtacatctttcgattaattttaaaaagagaacaacaacttatgatgttgaaagcattgattctaaagtgattgacttaaatgagtatgaagaggaccaagaattattagatttaacattctatgatagaaaagcagtggcttattggtcacaggaaatcataagtgataaaggtttgatgttatcagtaaatgggttacaagatttagtctgtcaaacacatccattttcgcaattattacatgatgcaattcaccttgcatttgataatgatataacatgtgtccacgtgcctatgaacggagagaaggggttgaatggacagattcgaaatgaagatttgtatcatgcatacccttatccagataagccaatggatatgacaattagtggtcaaaatatcaaagatatattggagtatagttattcacatttagattttgttaacgagcaattaagcttaacaattattgatgaaacattatgtacaatgtggcaaggattcaattatgagattgatatgaatctagaacctgggcaacgagtaatgttagatcaaattgattcgactaagagttatagagttacaatgactgactattgttatcgtaactacaagaattatttaaaaaatgctattatacatgaatcatacgatgaaacaatgagtacattaattgcagagaagttaagagatccgaattatcttatttcatgtagtgataattttgtagttaaaaacaggtgaatattgctatgtaataaattaattataagtttaacaagtataaaaacctttcttagagaagattatctaggaaaggtttttagaattataaaattgatataaaagaacagtgaaattctcattcattatatatataagtaaacaaaaaagcttaaatggtatataccatttaagcaagtaacggaaacggagggattcgaaccctcgcgccgctttcgcgacctacacccttagcaggggcgcctcttcagccaacttgagtacgtttccaatggctccacaggtaggactcgaacctacgaccgatcggttaacagccgatagctctaccactgagctactgtggattaatttgtatgtgtttgaatatcaagcacaaatattattataacaagattaagttaatttgcaatagataccttaaaaaaatatgcagaacatttacactatatttataaaacattccgcatattttaaaaataaacaatttatttatcttcaaataaagaatagcgtgtcaatgcttcaaacacattcaatgtggctttattataatctattggttggtcgggattttttgatatcatgcgagattgtttatctaccatgtaatagtaaaaaatggaattgttatattggtgccataaactgtggtatgaaacatgaagaatgattgattcattattaataaatgtcactttacatttacgattttttaattctttaatactttcgatataatgcatatttaaccaaatattttcattttgtctgtcagaatgtgttgggaaaaaataagttggaaataatggtgttagtaaaataggtggtttactagaaatgccagtaatgcggtttgtctctgctttcttgccaagataagtattaccataaaatttgcaagagcgttcaatgattttctggactttaaaaggattttgaatacgcgttttgtcaaaccgaattatttcactaccatttctttgatcgtcatcatcaaatgctggtcgaataaccatgtctcctttgcgtatcacataaatattttgagaatacataagcaaaacctcgctttattaagttttaaaccattaatataaaaatgcaattaatgatataaagatattttataataaaattctgagttgtcaagttattattttggtgaaaatgtacaataatttttaactaatagtcagaatattcattgatttcaaaattagaaaaatgtatacttattataaattaaagaaaggtagtggtttctatgaaatacaatactaatgttaaacatacaactttagaagcgtttgtcacaaccgtcaatgatttgggtattgaattaattatcaatgaagcacttcgagaggtaagaaaacgacagctcatagaacttatagatgacgcactcgtcaataaagatgaagcagcatttaatcaatatatggcagaatacaaaaatttggaggcatttctcggtgaataacattgattcgaattccataacgcaatcataaaaggactattcttaacatctcatacatgtaagaatagtcctttaatcgtttatgacattaatctaattaattcatgtctatctatgtcaccgaaatagtgatataaatcatattctgatagtgcttcttctatgtgctcaaagtcgtgtagacagccaactaatgcattttcaagatcagtgacatctccgacaccaaagaaatcaccgaaaatttttgcatgttcgattttacctcgtttaacatcaaacttgatttgtacaaatcctttttcaaatttttcctcgcgttcaaagttatatttagggtttcttccataattccattcccaagttctatatttgtcgttacttaacttttcaatattttcccaatcttcatccgttaatttatattcttctacttcagtttctccaaagatagttttcaagatgatttttttaaattcttcaatttctaaagggtcatttaaaaattcttgaatgtttgctactcgtttacgaacagatttaataccttttgatttaatcttagctggattaacttttagtgcattctgaacttcgtctaaatcactatttaacatcaacgtaccatgactaaacattctatttttaactttaaccatggcatttcctgagattttcgcttgtccaacttgaatatcgttacgaccagttaattcagcatttacgcctaaagattgtaatgcttgaacaattggttcagtgaatttttggaaattgtggaaactgttaccatcatcatctgttataaaactaaagtttaaattgccagtatcatgataaacagcgccaccaccagaaattcttcttactacatcgatgttatgagcatctatatatgtctgatttacttcctctatcgtattttgattctttccaacaatgatagatggtctatttatgtaaaataaaaagtaactttcttctgctggtaaattttttaaaacatattcttccattgctaagtttaaagttggatctgtaatattattattactaatgaatttcattacaatctctcccttatatctatatatattctctacttatttatgccttaactttgctgaaaatgccaattatatactcacaaatcgttctaaatatcggcttaaagttacattttattatttttgattgttaatagtttatttgttaagtgaattttagtacaatataatttagttatgatttaaggaggacttaaaatgactgttgcagaagtgggtaacattgttgagtttatggatggattaagaggtcgtgttgaaaaaatcaacgataactctgttattgttgacttaacaattatggaaaattttaatgaccttgatttaccggaaaaaactgttatcaatcataaacgatataagattgttgaataagaaggtaagttataatgaataaaatctcgaaggctttaacttggtttattataagtttcattatatttcatctcatattatttattatgtggggcgaacaccaagaatactggtatttatatacaggtataatgctaattgctggtatcagttatgtgttttatcaaagagatattgaatctaagcggttgcttacatcaattggtgttggtattattacggcaattattttaattatgcttcaacttttattctcacttataacttctaatttaagttatagttcattaattaaagaattagcaagaacaggtgtcaattggaagtggcaaatgttagtaactttactttttgtcattccatgtcacgagttatatatgagaactgttttacaaaaagaattaacacatttttcaataccgaaatgggtagctatattaataactgcaatttgttctagttcattatttatttatttagataattggtggatagtaacatttatatttgttgcacaagtgatattatcattaagttatgagtatactcgacgtatagcaacaacatccgttgcacaaattgtagctattatattgttattaatttttaatgcttaaataagcttttcttagacgtctgtgttctaagaaaagcttttttgctttagaatagcaatacgaagattcgaggcatgcttcattatagtgtacacgtttttaacggcaagctgttattattgagattaggttttagtcagtttttattactaaatattttataaaaacagtataatattttgcgagcaagtttaattgatggtggctatctgagtaaaggggggtggtgcctatggcattacttaacacttttgaaaggaaaagcctattgtgatatctattgcaaacgcattacatttaatgttaagtttcggtatgtttatcgtcactttcattggtgtagtagtcgcaataattaatttaaacaataaaaaataaccatcatttcaaaactttgacaacgaatgatggttaaagaaaatctcatttagtcaccgtctttttaacgggctcattaggcgacatgttcctgcatgtcgtctttttacatttttatagtaacatatcttttatttaattgtctatttttattagatgtgtaacaaaattttgaagtattttccgtatattgcctgctaaacatgtcagatttgaaaggaaaatcatactgtggtagaaatcaattatgattatatggtagtacttataaataagtgatttctattgaatatgtaatgaagttcatatattaatataactttcattgatatagaagtcgcaatgattaatttaaacaataaaaaacaaccatcatttccaaactttgacaaagaatgatggttaaagcaaatctcatttagtcaccgtctttttaacgggttcaataggggacatgttcctgcatgtcgtctatttatgcactgcgcaatttaataataatacaattatactttgatgtccatttaatataaagtggttgaaatttgcagcaaataaattaaccttgactattttcagaaaattctgtataaataacgaaaaagagatatggattaaatatgaagaggtgtttttatagaagaataaaatttttggcactatattatatttatctttagcacttggattatcaacagcagcttatgcatctacagaatacgctgaaggaggcacttggagtcacggtgtcggcagtaagtatgtttggtcgtattattatcatgctcataaaggtcatggtgcaacagctatcggaaaatatagatcatttagtggttatacaagagccagtgtaaaagcaaaagcatcagctactaaacataatttgcgggtcaatagagcgtattataacatttattaaatactaaaaaatcatagaaagtaaacaacgcaagaggtacaacatgaaatggttcaaattaatacttgatgttacaatcttcattctgattgctatattgttatttgtttatacatataaagaaaacgaagaaatattgcctgatactaaataccctatagcggtaactgactggaataaaaaatatagtaaaaatgagatttataaacgtataaatcaattcgctaaaaatgagaacgtagcaatctataaatcaacttcaaattatacaaacaaaaacgtagataaagatatatatgtatttaataaatcaaaagcaacaactatcactccttttaatgctaaatataacattcattatttaagtgacgacgaattattaaaaaaagatatcaaagggagttattttgtaaaagacaaaaattttgacgtgactaaattcataaattttttaaaagaatatggtgttactgctgaatcatacaaaatagattatatgatgattgccgttggtgtcattaaacaaatgaatatagtagtgccattatcctcacttttaatcgtttattttatttattatattttcgaaaagaacattaatttcaaagcgtatgcgattaagtatttaaatggttttacattaagaaaaataattttcgaaaatttttcaaagaaatgcacgtattgggtaacgttaatcataactcaaattcttttaactacaagtgtactttggatattaaattacacgggtaatttagatttattcatattaagattagttctgctttcatgtcttttcattttaacgattagtgttattaatttatggactttcttaatgttactaaatttaaatattgccaatatgattaaaggtaagcagcactttaaaacaattcgttttattaatacagtttgtaaaagtgttctcttagtactaatagctagtgtaatgatagaaaatactagtgttattaaagatttgaataaaataaaagaaactgagaaatattggaatgtattagatgattattacacgattgaatttgcaccttatcacgaaacaaaacaaagtttgattgataatatggtgcgatcagaacaattagtaaaggctagtgaagcagaaaataatgcgattttattcaaacgaaagggtgactccgttgacaatgacaacttttcacctgatgaggggaatgtaatattagtaaataatcagttttggtcgatttatcacaagcagtttcaacctgatattccaataaaaaatcaaaaaaataatgtcgaagtaattattccacaaaagtttcatgcaatgcgtaatgaaatcaatcaagcatatcattcatggtttgaatttgtacaaaataaaaataataaagagagtaagttatctatacagtttatcaacaaaaatgattatcgaatttttacatttgatgcacgagatagtcgccatttgtcatttatagaggcgccaatcattgtgaatgttcaggcatcagatttatcgaaggatttttattatgccatgatcagtcaaggcgggtatttattcaaaaattatgacgcgctagtaaaaaatattgaaaagtatcatcttgatggggaaatcagtggaataaccaattataaagatagcttgatggaaatgtatcatgaaaacaatttgaaattaacagtactcaacttttcacaaatcattatcgcaatcattttaataattattattttatttgatgtgaaatattattttgaacaacatcgaaaattactcgtaatcaaaaagctatatggttattcaacattaagagccaattaccaatacttattaataaataatatagttgttgtttttattggaatattgacgaatgtaattttacattctcactatataatgatgatatttgcaacgattattgtcgttcaaatattattgcagatttgcagcctatactatcatggccgacgttttaatgaagttatcaaggagttttaactatgaaatatatcattgcaatattattaggattaatcgtatctattactattgcttttacaatcatacatcatcctatacttgatcgttttaatcctttcttaaaaacggaatatagttatgccaaagtgccaaaaggtacgcaacaatatgttaatattacggcttatagtgaaagaggggaaaagcttgattataaattaacatttaatggattttctcctagtagaacgtatgtcgaaataaagcataaagggcaatatgttatatcaatcacatatgttgaaaaagatgatacaccaaaagaggtaagacaagaatgatagaattaaaagatttaaccatacaaaaaggtaatacacatattttgaagaaacttaatttgaaatttcaatgtggaaaatcatatgcacttattggtaaaagtggatgcggtaaatctacattattaaatactattgctggacttgaaaaaacaggaaaacaatatgtctattttaatggtcaattagaacaatttaaatctaatttttacagagataaattagggtatttatttcaaaattatggattaatcgataatctgacagtaaatgaaaatttagatattggattagcatataaaaaaataagtaagaaagaaaaagaacaattaaagatacgttatatagaacagtttggtctgtcaaacagtttaaaaagaaaagttcatacgctaagtggaggtgaacaacaacgtgtcgctttaattagaatgatgttaaaagatccgattgttatgttagctgatgaaccaacgggtgcgttagatcctaaaacaggacagatgattattcaatcattatttgatttgatcgatgaaaataaagtgctgattttagcaacacatgatatggctattgcaaatcaatgtgacgaaataatagatttagaacagtatagaaaagtagcatctatgtgatatccaaaagataaaattaaaagccaatcaattgggaatgttaatttcaacactccatttgattggcttttataatgcgttgctatgttatgaaagtaacaacggcaaactgaaaaaaaaacaatataataatatttaatacgagtagtaataaatgtaattgattttttgttttaatgtagcaaaaaacaatgactaaagatagcagcaatatcatgattgcacctgggaagaaccataatgctgaagctacataccaaatcattggtaacgccataataataaaagatataagacaagaaaggataccaataatattataagttctagtcaaaattacacctccaattttcattttaaaatgacatgcaaaaaacaatcattttaaatacatcatacaataaaaataaattgtatgatagatgaatttgaaattaaattgaattggcttatcattcgtaaacattattatgacgtaacaattcttataagtggaacgagtgtaattataccatctgtatagagagtcgtatcaatcgtaaaatttaatctatgttgttattgatttttatactacaaataccgttctaacattgtgtgaaatattatttttcacaaataaacgaaattaaatattttaattattgtatatatagttgctctaaatggttgcggagtataaaatatattttgttaaatattttattaagaggtgcgctatggaaaaggggattttcaattacgataatgcgaatgtattaaaattagatactaatcagttaaatgaaaacataaaagtcattgacgatatatttaaaaattatgagcagatagagccaactatagaaatcgaaaatggaaatacaaaattaaaattaaatggatattttattgcgtcaattataagcccattaaatttaaataaacttaataatttatatgttgaagaagaattttatcatacatataacgaattaattgttaaatatactgaggtaaaggaataattataatgaaaaaaatatttatgatggtacatgagttagatgtcaataaaggtggtatgacctcttcgatgttcaatagaagtaaagagttttatgatgcggacatacctgctgatattgttactttcgattacaaaggaaactatgatgaaattattaaagctttgaaaaaacaaggtaaaatggatcgaagaacgaaaatgtataatgtatttgagtattttaaacaaatttcaaataataaacattttaagtctaataaattgttatataaacatatttcagaaagactaaaaaatacgattgaaattgaagagagtaaaggtatttcaagatattttgatataacgactggtacatatattgcctacattagaaaaagtaaatctgaaaaagtgattgatttctttaaagataataaacgaattgaacggtttagttttatagataataaagtgcatatgaaggaaacatttaatgtagataataaagtttgttatcaagtattttatgatgaaaagggatacccatatatttcaaggaatattaatgctaataatggtgctgtaggtaaaacttatgtgttagttaataaaaaagaatttaaaaacaatttagcactgtgtgtttactatttagaaaaactaataaaagattctaaagatagtattatgatttgtgatggaccagggagttttccaaaaatgtttaatacaaatcataaaaatgctcaaaagtatggcgttatccatgttaatcatcatgaaaatttcgatgatacgggtgcatttaaaaaaagtgagaaatatattattgagaatgcgaataaaattaacggtgtaattgtattaacagaggcacaaagattagatattcttaatcaatttgatgtagaaaatattttcactattagcaattttgttaagatacataatgctccaaaacattttcaaactgaaaaaatcgtaggtcatatttctagaatggtaccaacgaagcgaattgatttgcttattgaagtggctgagttagtcgtaaaaaaagataatgctgttaaatttcatatatatggagaaggatctgtcaaagataaaatagctaaaatgattgaagataaaaatttagaaagaaatgtttttcttaaaggatatacaacaactccacaaaaatgcttggaagattttaaattagttgtttctacatctcaatatgaaggtcaagggttaagtatgatagaagcaatgatttctaaaaggcctgttgttgcctttgacatcaaatacggaccaagtgattttatagaagacaataaaaatggttatttaatagaaaaccataatattaacgacatggctgataaaatactaaagcttgttaataatgatgttttagcagaggagtttggttcgaaagcgagagaaaacattatagaaaaatattcaacggaatcaatattagaaaaatggttaaatcttttcaatagctaaatgaaaaaatcctaggtattcatgagtacctaggatttttacgcatgatatatacaaaaaaaagagaggatagtcctctcaaataatagttaataaaattgtagccatttcttccagctgtaactactaatacaagctaagttcattacgatgtgtatgatttcaaattcataaccacttacatatcctcttgtaagtttaagtgtgaagattgagcctaacataacacaaatataaaaaacattaacataaggcgttaaaaagccgataataagtgctaaacctccaacaacctcaccaattgacatcaatactgcgatggtaggtggtaaacctaaagaccctaagaagtgaattgttccatctaaatctacaaatttcaatgtgccgtgtactaagaatgatgttgctagcatccatctaattaatagcatacctaatttcatcatgtcacctccaacatacatttttttcttaaaacatagtccaaattatatttgtaaagaagtggaaagtaaagattatttataaaaataattattaaatatttattaaatgttctattgtattgaacaattgttgtagaaagatgtttaagtcatcagttactttttgtatttataaattaagattagtacagcatagtgcaaagtttataggtaaatgaattaattatggcatcaaaatatacgtatcttgaacactgttgtggaggcttagtagtagtgagaacaaacagaatactactttaagcgatatgattaatattaaccagtgcgtcatcatcaaaattagaggccatttgctgtttataatacgaagatttgataatcaactatgataagaaaaaataatgaccgtttaaatatattataagtttattaaatgataaaataataatatagttctctataaaaattgtttggaggtaaatgtgtgaataggaatatcgttaaattagttgtgtttatgctaatcttagttgtagcagtagcgggttgtggtcaaaaagatactgaagagaaaactgaaatgacgacgataaaagatgaattaggaactgaaaaaattaagaaaaatccgaaacgtattgttgtattagaatatagttttgctgattatttagcagcattagatatgaaacctgttggtattgcagatgatggtagtactaaaaatataacaaagtcagtaagagataagattggggcatatgaatcggttggatctagaccgcaaccgaatatggaagtgataagtaaattaaaaccggatttgattattgcagatgtcagcagacataagaaaatcaaatcagaattgagcaaaattgcgccgacaatcatgttagttagcggtacgggagattacaatgcaaatattgaagcatttaaaacagtcgctaaagcagttggcaaagagaaagaaggcgaaaagcgtctggaaaagcataataaaatattagcggagattagaaagaaaattgaacagagtacgttaaaatctgcatttgcatttggtatctcaagagcaggtatgtttattaataatgaagatacatttatgggacaattcttaattaaaatgggtattcaacctgaagtcacaaaagacaaaactgcgcatgttggtgaacgcaagggtggcccttatatttatttaaataatgaagagcttgccaatatcaatccaaaagttatgattttagctacgaatggaaaaatagataaaaatagaacgaaattcattgatcctgcagtttggaaatcattaaaagctgtgaaagataataaagtatatgatgttgatcgaaataagtggttgcaatcaagaggtattatcgcaagtgaaagtatggcagaagatttagaaaaaattgcagaaaaagcaaaataaaaatacagcgccactcgtaaatcatataagagtggcgctgtattttttatttatgtttattatctgtcggatgtgatgatttacctgaaagtttatttcgaataaatttaattacataaccgacaaggattgttttaacaattcttttaatgaattgacgcatcgttacatacctcatttctctttatcttatgtactatatacccattcatatatgctttttaaacgtcattgtcacaatttaatttttagggaatataatataaccgtctttatctgcttttttagtaaaaatgacaataatggcatgtattattgaaatgatggtagggatacctgtccagaaaaataataagtgaaaaagaccttgtccaaatttatcagcataaaatttatgaatacctaaacctccaagaaataatgcaacaataacataaatggctttattgactttcatttgtaaatcctccttaattataattctacttaaattcgttgtgaaaaccaatctttctaactttagaattttcaaactttctaaaattataagtatatctttttaaaataagctagaatttctatataataaatgttaataacgtaaaagggaatgatgacatagtgatacgtcaagcacgtccagaggaccgatttgatattgcgaagttagtttatatggtttgggatgatatggaattagaattggtaaagcatctacctaaagacatagtattagatgcaattgaaaaaagctgtgttgatgcaacatatagaactttttatcagcatgttttagtttatgaaatagaaaataaagtagcaggttgtattattagctatagcggtgaaaatgaattgaaatatgaaaaagcatgggaacaacttgacttgccagaagaaataaaacaatatggcacgccattacccgtaaaagaagctaaagacgatgagtattatatagaaacaattgcgacatttgaagcatatagaggtagaggtatcgcgacaaagttattaacgtcattacttgaatcaaatacacatgttaaatggagtttgaattgcgatattaataacgaagcagcattaaagttatataaaaaagtaggctttatatctgatggacagattgaattatataagcacatgtatcatcatttaattgttaaataaaaaaactcgacagttcgatgtaagtcgattgccgagtagaatcatcttatattaaatgcctgcaaataatgcactaatataaatacctagtgcatataataaaccgaaaaatgtatttgttttaccagcagcagccattgctggcatcattgtaggcggtgtatcattcttcttgaaacgtctgataactttaacaggcattgggaatgataacaacgcaagtaagtaaaataatgagccaccaggtttaataatgatcgtaagtacaataaatgcataagcgataaagtacatgattgccataaatgttaaagaagcatttttacctaatagaatgggtaaagttttacgaccacttgctttatctttgacacggtcgcgaatattgttggccatattaattaaaccgatagtgattactataggtacacttaaccaaattacatagctttgaatattgccagtttgaataaagaatgcaataacgataataaacatacccataaatacgcctgagaataattcaccgaaaggcgtccatgaaatagggaaagggccacctgtatataggtaaccaacagccatacatactaatccaactggtaataaccaaaatgaagagttagcagctaaaaacaaacctaatatcgctgctaagatgtaaaatgcaatggctaatcgtagcacaagctctgggctcataccgttgcgtacaattgcaccaccaatgcctacagattcatgatcatcaaggccttttttataatcatagtattcgttaaacatattagttgctgcttgaataagtaagcatgctagtaacatggcaatgaataggctgattttaatatgatcttcgctaccaagaaaatatattttagatgctgctgtaccaactaaaacgggtactacggaagcagttaatgtatgaggacgcattaaatgccaatatttcttaactgtagaatattgctgatattgattactcattgaatacaaaacctctttaaatcatattttttataacaaagatattttaatagaaagtagcataaaggtcaattgacgtgaaaaattgcaagataagtttaagcaattcttgtaacacaattatccaaaaatgatacaatataataatgagtgaaaaaagacgaagaaagaagtgaaatggatggctacgggcgtattagaggacgatattgtcaaagagatatatgacagctcaaaggaatgggtttcagttgaagtgaaattatcacagtcactagacccgagcacattatttcatctcactgacaatgaggcaggagatcgcttttatatgcgtttgaatgataatcgaacgtcatattttggctacaaagcaattcaattattcaaaaataattctaaaaataaacaatctatttttaaagactgggaaaaattaaaacataacatcacatttatacatccgcaatctgagaaacatcatcttcgagttgttggagggttccaattttcaagtcataaatcagatgatgaatggcgagagtttggactaaatcattttgtattacctgaagttttaatttcaacagataataatgggacatttttaacttatacagttaaaagggaatgttttactgttgaggcattgaacgatttaacggatttgttcaacaatatatcggatatagatgtggacgagcaaattggggaaattactagaaatgaagatatttataaagatgactggcgtcaacttgtagtagaagcaatagaatctattaataatgaagaaaaaattgtactagcacgtagacggttaataaagttcgataaagatatcagtattccatatattctaaagcaagcatattctaaagaaaaaaacagttatatattcttgttagaatcacaagattctatattcttttcacagacacctgaacaattaataaaggtcaataataaaatactatcgactaaagctgtagcaggtacaattaaacgttcacaagatgaggacgaagatacaaaaaatgttgaagcatttttaaaagataataaaaacttaatcgaacatcgatttgttgttgacagtattttacatgatattaaaccttatatcactgaattacattatgataagacgcctaaaattctaaaaaatgatcatttatatcacttgtacactgaaataaaggcgccactgaaggatgattcgtatattagtttaattgataatttacatccaacacctgctttaggtggctatccaaaagaatttgcgatggattttattgaacagaaagaatttggtacacgaggattatatggtgcgccggttggctatatagatatatatgatgattgtgaatttattgttgcaattcgttcaatgcttattaagaaagcacaagcaactttatttgctgggtgtggcattgttaaagattctgatccagatagtgaattggcagaaacgaaccttaagttcacacctatgatgaatgcattaggagtcgatatgaatgggaaatcataaagcagctttaacgaagcaagtttttacatttgcatctgagttatatgcgtacggcgtaagggaagtagttatcagtccgggatcacgctcaacgccacttgcacttgcatttgaagcacatccaaatattaaaacatggatacaccccgatgagcgaagtgcagcgttttttgcagtggggttaattaaaggcagtgaaagacctgtcgctatattatgtacgtcaggtacagcagcagcgaattatacgccagcaattgctgaaagccaaattagtagaattccattaatcgttttaacaagtgaccgtccgcatgaattaagaagtgtaggcgcaccacaagcgattaatcaagtaaatatgtttaataattatgtaagttatgagttcgatatgccgattgcggatgatagtaaagagaccattgatgcaatttattatcaaatgcaaattgctagtcaatatttatatggaccacataaagggccgattcattttaacttgccatttagagatccgttaacacctgatttgaatgcaacagaattgttaacttctgagatgaagattttaccgcactatcaaaaaagtatagatgcatcggcattaagacacattttaaataagaaaaaaggtttaattattgtaggagatatgcagcatcaagaagttgatcaaatactgacgtattcaacgatatatgatttgcctattttagctgatcctttaagtcatttaagaaaatttgatcatccgaatgttatctgtacatatgatttgctgtttagaagcggcttagacttaaaagtggatttcgtaattcgtgttgggaaaccagtgatttctaaaaaattgaatcaatggttaaagaaaactgatgcatttcaaatattagtgcaaaacaatgataagattgatgtctttccaatagcaccagatatttcatatgagatttctgcgaatgatttctttaggtcattaatggaagacacgacagttaatcgagtaagttggttagaaaaatggcaacgcatagagaaaaaagggcgtaaagaaattaaatgttatttggaacaagctacagatgagagtgcattcgttggtgaattgattaagaaaacatctgaaaaagatgcattatttattagtaatagtatgccaatcagagatgtagataacttgttattgaataaaaatatagatgtctatgcgaatcgtggtgcaaatggtattgatggtatcgtatcaactgcacttggtatggctgtccataaacgagttacattattgataggtgatttgtcattttatcatgatatgaatggactattaatgtcaaaattaaataatattcagatgaatattgtattattgaacaacgatggtggcggtattttttcatatttaccacaaaaagaaagtgcaaccgactattttgaacggttgtttggcacaccgacgggattggatttcgagtatacagctaagttatatcaattcgattttaaacgttttaacaatgtttcagaatttaaaaatgccacattgttatctgaaacttcgacgatttatgaattgataacgaatcgcgaagataactttaaacagcatcaaattttatatcagaaattgagtgaaatgattcatgacacattataattactatgaagcaaacgttgagaccaatcaagttttagtatttctgcatggatttcttagcgacagtcgtacttatcataatcacatcgataaatttactgataactatcatgtcatcactatagacttaccaggacatggcgaagatcagtcttcaatggatgaaacgtggaattttgattatattacgacgttgttagaccgaattttagataaatataaagataaatcaataacattgtttggatattcaatgggtgggcgtgttgcattatattatgcaattaatggtcatatccctatatctaatttgatattagaaagtacgtcaccaggtattaaagaagaagcaaatcaattggaacgtcgccttgttgatgaagcgcgtgctaaagtattagacatagcaggtattgaattatttgttaatgattgggaaaagttgccattatttcaatcgcaactagaattaccagttgaaatacaacatcaaataagacaacaacgattgtctcaatcgccacagaaaatggccaaagcattaagagattatggtacaggtcaaatgccaaacttatggccgcgcctgatagaaattaaagtaccaacattaatattagctggagaatatgatgaaaaatttgtacagattgcgaaaaaaatggcaaatttaattcctaatagtaaatgtaaattaatttctgctacaggtcatacaattcatgtggaagatagtgatgaatttgatacaatgatattaggatttttaaaggaggagcaaaatgactaacagacaatgggaaacacttagagaatatgatgaaatcaaatatgaattttacgaagggattgctaaggtaacaataaatcgccctgaagtacgcaatgcgtttacacctaaaacagttgctgaaatgattgacgcattttcacgtgcacgtgatgatcaaaacgtttcagttatcgtattaactggggaaggtgatttagcattctgttctggtggtgaccagaagaaacgtggacatggtggttatgtaggtgaagaccaaatccctcgcttaaatgtattagatttacagcgtttaattcgtattattccaaaaccagttatcgcgatggtaaaaggttatgctgtaggtggcggtaatgtactaaatgttgtttgtgacttaacgattgctgctgataatgctatttttggacaaactggtcctaaagtaggttcatttgatgcgggttatggttcaggatatttagcacgtatcgttggacataagaaagcacgtgaaatctggtacttatgtcgtcaatacaatgcacaagaagctttagatatgggcctagtaaatacagtggtacctttggaaaaagttgaagatgaaactgtgcaatggtgtaaagagattatgaaacactcaccaactgctttacgattccttaaagcagctatgaatgctgacacagatggtttagctggtttacaacaaatggctggggatgcaacattgctttattacacaacagatgaagcgaaagaaggccgtgatgcgtttaaagaaaaacgtgatcctgacttcgatcaattccctaaattcccataagttattttgaatatgatattaagtcacttgcgtcgtttattagcgacgatgggtggcttttttattttataagtatttaaaagggcatttttattaattatcataaagataagttagtttgagaaaaattaatagagaaagaataaatgttaaagattattacaatgaaaaaacgagctggtgagaaattgaattctcgccaacccgctttatgaagtgaaatcatttaaattagttatactaagcgctcataaacaattggtcgcgaagtgccaataccttgtttggatgacgtttgcatgaggatatgctgtgtatcatcataatcaagaatataaatgatttcttcattatcaaaagatgaaaatttaatgcgttgatgtgccgtatctataaaaagaatatgatattgattgtgacttgtatcatcgccatgacgtatacaaattgatttttgtaattgatgattactccaattaccaatgaataaattgatattggtttgttctagatgtgtgagtttggttgtgtcgtaaactaaatttataaattgtagttgatacatagttttacctgcctttaatcaatatctatattactttttagtaacctatcattgaaccataccagttataatcacgattgaatgataaatgtaataggcttgaatctgcatcttggattgataattctgtatcccaaggattccagtaaataagtttttcttggtcattaattttagcattaccaacaactgctagggcatgtcctaaatgtgggtcattaggattttgagatacactttgtgcaagaatcataatacccacattatcttttgtaagttgatcaacttgattatatgatggtacgccttcttgataatgaatatctctaccttgtgatttaccgtattcaatcatttgattagggaatgttgcacaattaggaaggtcttgctcacttacttcagggtataatgtacgcataatatcatgtgcattataagtgtctgtatttttagttgcatttaataacgctgccatactgaatcctgcacaccatgagttatcgaattgttgttctctaattttgaagttttttagtgtgttttcatattgaacttgatcttcttgtatcgcttcgttttcttcaacttttgtaggtgttactgtagtttttagctcttgctttaattgtggtgaaactgttttagcactttctttttctttgatgttattagctagtggcgtagcttttactaatctaactttgccatcttcttcaaaataaaatcctttttcatcagtaagaacagtgatatttgaatttttatctttaatttggtctaaatctttagcgatgaagtttgaaattttaacactgtaattcatgtcttcttttgatttgtttaaatcatctttatttttagggctaagtgttaaagtataaacaattttaccgtcttttataactggataatagtaactattatcttcttcgccattaaatttataaattttaaatgcttcaccaagttcgtatttaccagtttttgcattactttgtttatctaatgctttagcataaccagcaaattgttgttgtgctagatcttttactttttgaggtactttgtcactcttaacattaatttctagctgtttagagtgtgaatcggctttggctttattgttattagcaaatgcgcctagtgataaaataagcattgaaaccattatgatgcttataatattgaatactctagttttacatgaactattcatataataccctccatttaagtcaaaatattttgcgttgttaagtttttgcttctatatactaaatccaaattaagatgaagtttatgcagcgtcagggttgtctgaattattgttatcgccattgtccgggttatttgggttgttaggttggtcagggttatttggattgtccgggttgttagggttatcaggattattaggattgtctggattatcagggttgttagggttatcagggttgttaggattgtccggattatttggattgtctggattatcagggttgttagggtggtcatcatttgcgaaattgatatcttcaatattttgttttaagaagttgcgtacattttcattaataaatactgcaccgttaaattgatttggaacgccaccccaatgaatgccaatgacttcatttttttcattaaatacaggtgaacctgagttaccaccagttgtacttaaatcatattgcattgcttcaccttttaagtacgttatttttcctttactttcccacattgttgcgacaggtttatcaccaggatatcctgttacagtaatattttggttaacttgtgtttcagcattattactcattgttgctggtttaactacttcgccaatatgtttgttttgctcattaggggagaatttaacgattgctaaatcaccttcgcctgaatatttagtgatttgttcagcagtgaaaccaccattaggataattgtcttggttaattgcagaagggaatgcttttaaagcatgaggatcaccgtgcgtagcatctacgacgtgtttatttgttaaaagtgtatctttacctacaactacaccagaagcaataaatgtaccagtaggtgcttcaacttgaatataagtaacaggtgcataatgaccattcgttgtatctgtgatttggtgacgatcgttatttggtaatataacattagcgcgttcacgttgttctaatggtttaaggttaccgcctttttgaatcttaggtgtttgctgtttgtctgtctgcgtttgttgtggatgattgtccatagcttttgaagataacgcatttgctgctggagaactcacaagtgtcgctgttgtcaaagttgcaacgaataaagaactaacttttaaaaatttacctttcatctaaaaacctccaaaaaatttatttacaagttaaatataacactaaaaatttttaagtcaataagaatatataaataaattaaaaagtttctgtaaagattagagtttaaaaaacattaagagaattaaaattgaattgtattatactttattcgattgtgttaaattggtaaggtcgtcaattgtttgcatttatctaaaagaataaataagaaaggaattgagagcgaagagaaagtatttgtttataataataaatagtaacgtttgaataataattgtttggtcaaaggtagattaatatgaatgctgatatattatttgagtgcttaagtttcgaagaacaattatcagttagcatattaaaagcttttgatagaatcattttgagtgaggtgtttaaaggagaggaatataactcggtagtatttacagtctctttagagtattatttaaaacatatagaatataaaaaactgaacgtactatgaatttcgttcacgacgtccagttcaacatatcatttttatttagtatttaaatatttagcaagtctcttcataccttcttttaaaacatccatttcataagcataggaaatcctcacaaatcctttaccgaattctgtaaaggatgagcctggaacgattgctaaatgtgttgattcaagtaaatcgacacaaaattcgaaatcgtcatcggtgatatgcttaatatttgggaaaatataaaacgcgccttcaggttgagcggtaatctcaaaacctaatttagttaattcagatactaaataatttcttcgttctacataagcttcattcatatatttaggagcttctaatccttcgttaagtgctgttatacatgctatttgagctggaacattggcacaaatacaattataggcgtgcataaatgttaatttatcaatcaaatattgaggtcctaatagaaaaccaattcttattcctgttgctgagtgtgatttacttaaaccaccaattaatattaattgatcacgaatgtcttcaaattcagcgaaggatacatgtttaccactaaatgtattttcagcataaatctcatcgctaataataaatatcggatatttttttaatacatttacgatatttaaaacttcatttctttttaaaactacgccagttggattagtcggataatttaacaagacagcttttgtctttggagaaatatgactttctaacgcatcaggtgtaattttgaattgtgttgctgttgtatcaatataaattggtttaccacctagtacttcgatgagtggtatgtagcctgcataaattggtcccggtattataatttcatctccaggctctatgatagaacgtaacgttgtgtctattgcttcacttgctccatttgtcacaataatttcttcaggatcataggaaaaatgataacgatttttgaagtattgactaatagcttcgcgagtttctaataagcctttattgtgagagtaagatgtcttgtcattgttaatagcatctatatatgcctttttcacaacatcaggcatagggaagtctggttggccaatagttaaattaacacaatcatccaaattattcatacgatttgaaaattggcgaatacttggtgctcttaaaaatttagaattagagtttaaagaaagtttcatcgtgacacctcaaatataaatcaaatattgtctaaaaatttagaaattaataatatcataacatacttttaaagcaaaaaagggtaaattacttaagctttatttgaaaaatgaaaaatgtctaaatacactgtagtaactacttttcaaaatgaatgaagtggttacagttaatgtacttagacattatataattatgagtctttaaactgtgatggtctttgtaaattaattattggatttgtccatttacaaacaaagtttgtagataatacatatacgatgattacagatatacttattaaataaagatacgtcattaatgatataggattatcgaatgggtaccattcaaatcctctaacaatgccaataattaaaccatgtaataaatatacgtatagcgtacgactgccaatataagtatataattttttctttgttgacattaaatttagaaacgcagtcattgcgattaatataattccatataatataagtcgtttaaaaggactgaatacactctgtccttcattttcaagtgaagtatatggtgaacttcctaataaccaatctgcattgataggatgaatcacgtaaatgataaaaaataaaataaacgtaatgatagatactggtattagttttttatttttaaaaatagccgtatgttttttggtgaaaatgtagcctaggtaaaatattgggaaaaatacgattgtccttgaaatgcttaagtagctatcgatgttatctgaaaaacctgctccaatagatataataattgaaactgatagcactttatatggattaaatcttctaactattactaaaatgacatgaaagaaaaatagcgtgatcaaaaaccataacgcaaatactgggttaaaaggatcaagttgtaattcgtcacttttacctgttaagaaataatatattgaaaagaatgcaaaaaatatcatataaggtactatcaagcgttttgaaattttttctaaatagtatggtttatcaatatttttcgcgaaataaccagatataaacaaaaatgttggcatatggaaactataaataactaggtataatgctgataaatatttatcgccactagtgtagggttgtaacatatgtccaaatacgactaataatattaaaattgctcttgcgttgtcaaaaaaataatctctctcttttaatgaagtcatattttatctcctttatgtccataagactcttactaatttattatattttgtattagttatgcaacaaatttgtctattgtgtcgaatagtattgtaaaaattataaaaaaagcatataatattataaataatatgtagtggagtagaacaacatgtataaacaacttgaaaaacttattacactgactaacaatgacttaaacttagtgaatagaagatttggacaacgcacggatatcacatctgaacagctagaacttctccgtattttatttaattacgatcgcttatcacagtatgatttgacgatgaagattagtagggaacaatctatagtttcaaggtggattaagaaattagttttgaaagggtacatcacaagtcaacaatctagcgaagatttaagatgtaaagaattaattttgactgatcaagcacgtacattaatttcacaaataaataatgcacgttgcgaattgattgaagcaagatgtcaatgtttatcggaagtcgaattagacaatttaaatcaattacttgataagttaaatcaacgacgcatatcgttgtaacacggcaatagcaaacacataatttagtgtcattgtgcacacaacaaaaattgaatcatgaattacaagcaaaagtagcggtgattgttaaaattgatggtaaacaatcaccgctatttttgcttgtgtatgtataaaaaagggatcaaaggtcatcccccatgattgatagtggggggatgacttttgatcctatgttcatgttgcttatttatattgtgggatgtcgaagtatttgccgacttcgccaattttatcatagtagcctttgatgattttagcattgatgttagcccaatctacatctgtagcatattggtgtgttcctggatgtgcaggattccatctcattttgtaaagcgtattttgaccagctttaacatatgagttgccgatgaatttagcaccaccaacgattgcttttgatactgtgtcccaaccagcttgtttagcatatttaataccttcacgtaaaggatcgttatcatatgcagcaataccaaatacgttatggtatttcgtgttagagttagttacaactttgttgttcactacatctgcaccttttgctaattgagaagtaccgttacctgtttctaatagggcatgtgagataagataaacttcattaatgccatacatttgagcagctttgttaaatgcagcaccttggttttctaatacacctttaccttttaagaattgattaattttatcaatagaaatattttgtggttggtctaagcgtaagaattgatattttaatgctggatcttgagctaaacgcttcgtatccattgcatgcttaacatcattaaagttagcatctgtccacttacctggtacacgttgtacttgtggtttatattgtaaaccagcttgtatttgagcaacttggtttaatgtcatacctatttgattatacttaattaattctttagctaaatcagttgatttaatccatgctaatttaccgttagataatttaccatagtaccaagtttgtccattaatgacttgttctttaacaactgcgaatggttgttcattaaatgcttttaatgagtatttagctgtatcagaatttggtgttacatagtaataaccattaccatttttaattacataagtgtagttataatctttggcagctgatgtagttggtttaacagcagttggtgcagttaaatcttttgaatttacccaaccagtgcggttattaatagtaccgtataaataaacatctttgcctacagatacttgtttcgttgcattaaatgtaccttgagcaatgttattgcctgttaaaatgacttggtttttagtaccccaaggaaccattgataagccgttatttgatctgttaacagtatatttttgagtcgttttaacttctttgcctaagttttgaacatttaagtcttttacattgaaccaacctaatggaatattatgacttgtattatttaataatacgtatgtttcattaccatgtgcacgttcttttgttacatagaatgtacgatccgcatattttgcaccgtttttcgctgttttttcataaacagaagcacgaataccagtgttgtttggtttaacttgagcaattttgctaactgtttgagtcgtttgaggtttagtaacagcataagcttttacagcagtttttggttgtgctacagcttttttaggtgcagcaggtacagctaaatatgctttacttatccaaccagatttaccatttacagttccatataaatagatagatttatcaatttgttgttgcttagtcgctttaaaagtttggttacctgtaccagataccgcaccagcttcttgtttataagtaccccaaggtactgaatataatttagtgcctggttttactgtataagtttgcattacatttacaggtgattttgcattgttataaataacgtcaccttgtttaacccaaccaattaaagttggactattgtaatctttaactaagtagaatttgtttccacctagacttgcttcttttgttacagcaaatgttttttgaacttctttcgttggcttaccagttttgtcataaactgtagtgaataagccattgtttttagcattaatttgagcaacaccgtttaatgatgaaactgttaatttattatttgttgtaggtgttgatggcttaggtgttggtgtaggcgtaggtttagcagtatcaactaaatatgctttacttacccaaccagatttaccattcacagagccatataaataaattgatttatcaatttgttgttgctttgaagccttaaatgtttggtttccagaaccagacacgctaccagcaacttgtttagatgtaccccaaggtactgtataaagtttcgtaccaggtttgattgaatatgattgatttacatttacaggtgatttagctgtgttgtaaaccacatcgccttctttaacccaaccaaatttattaccagaattgtaatcttgaacaagatagaatttttgattacctaatgtagctgttttagatacagcaaatgttttttgaacttcattagttgctttaccagttttgtcgtaaacagtagtatataaaccactatttgtaggtttgatttgtgcgacaccattattagcagcaactgttaatttaccagttgatggtgttgatggtttcgacggtgttgatggttttgatggtgtagtaggggtagttgtagattgcgtaccccatggcgccactttacccatttttattaaatatttttcattaattaagtcatatagttgatcataactataattatgacttcttaaatatccatgtggatcggcatggtccgtaccacctaaatatttacttacagcgtagtgagtccatactgtaccatttccatcatattcagcactatcaggttttaaaccataatattgtaattgtgtagctgcatagtcagcatagttattcattgaacgtgcaaatgaagcataatcgtgtgtgtgcacgatttcaacattgatgaatctagggttaccgactgcaccgacaccccaagataagtaatccgttggtgctgtttcgattatacgatccccatcaacaaatgcatgtacgaatgcgttttgatagttgtttttcatataactaatttcgccatttatcgtcgaacgatcattagctgtatcatgaacaacgataccttcaggacgacctacaccgttacggtatgcgtatttagggaagtaagatgtataatcttcctctatcttaggtgcttttaaattatttttacgaatgtaatcattaattgatgagtttacttgcggtttatattttggcaaactcgttttaggtgctgcagcggctgatcttggttgtgctgaagcactaaaagtagttacttttggtgtagcttcagttttagctttaggtgcaacaggtgttgcttttggtgctgcggctttatattgcgtttcaagagcagcaggtttagcagctgatttaattaattctggattaatttgattttctgaattatcatcttcatcatcaactaaactatatccagcacttgtaacattattgttcgttttaggtgctgttgtgtttgttgactttgtaacaggtttcgcattatttgatgtagttgattgagtcgcacgagtgtcaccatttacttgtgtagtatcaaccttttgatttacttgagcattgcctgttttattcgctgcttttggttggacaatagcagggtcttgatatacttgagtgccagaaatgttttgcgttggattttttacctcagcttttgcttgttcagtagttgctttaactttattactatctaaaacatttttattagtagtttgatcttgtgtcgtctcagctgcttgaacttgatgtgcagtgactgctgaacctacaagcgttaatgcaaccattgatggtagtttgtaattaaattttttcgccattctatttattactcctaacatttattaattattaatctcattatagtacctgttttatacacctgtgcgtatttaaccaatttgtaatatactcttaatttatattttcactgtaaaaaatgaaaaaaattttgaatctcaatggtgacgtgacaaatcaaatagaattgatgtcaatttaagaattggtttattacaaatgtttctataatagatacaactttttttaattaagcgaggtcaacttttttgtcatttcaatatgctcgatgccttcctcaagaaatatattacctctcattttaaaatttaaactttcatagaatgggattgcatgacattgggcattcatggtagctacgtaaaaaccttcatctttagctaatgattctacagcttgcataagcattttacccatgccttgtccgcgatgtgattttatcacagccactcgttctattttgacagttgtttcattgataggacgtatacgagctgtggcaactggctgtccattatcatatccaatgaggtgaatagattcagattcatattcatcaatttcactttcctctgggacgccttgttcttctacaaacactttctttcttatataaaagcaatcttctaacatctctggatcaatcacttttgaaaacataaaatccctccatatcctaacaaaatcatttacatttaatttactaataataacatagaataacgattgttattttccacaaaaataattagacataaaaaagctataaagatgattcataggaaccatctttatagctagatagagtgtatttgttataatgcttcttttctaataattgctgtatattgccaaaagattcgcatttgagcaatattccaattattcattcccattgtaaacccagaaggtttaaagatatttacatctgtcacttctaaagctgctgcgactaaatattgtaatggaatactaagtgatttcattgtttcagtaatgccattttcatcatatacccatgaaaatggtaactctgattcgaaaacatcaacactattgaaaatttcaggtagggctaaaatataacatgcaccatctacaataggattctcgatactatttttgtaataaattaggagtgcttcatagttttctcgatgctcatgattgacgtaaaaaaattcacttctaaaatgagccatatcttggctatgaataatttgttgttctaacatattaaacatcccatttatatttgcaatcttttcgtatgtttttctactcatgtatgatgctcctttcataaatagtaaatgttaatcgtcatataatattagtttacaacaccattttggttatttgaagcttgtggcgtttgttgagtgccaccttgattttgatttaagttttgatctgtagcaggttgttgttgattattgacgctattgttgttattactattattactgtcatcagtattattcgaagatttatctttatcagtggtatcgttttgttcttttcttaataaactactatctaaaggtgttaaaggtatgagagaaccataatgattaatgacacgttgatctaagaaatcatttttatcattaataggtgataattctaagtctttacgaagtaagtttgcatatttttgaatgctttctacacttggatgataatagtaaataccatttaacatatcatctttaccttttaattgcgcagttttaatttcaacatcatttgttaagtacatttttgctaaagctttaatttcagagttagttaaattatgctttgcatttttacctacaatttgaatcacgttatcaagtttatcaatagaatcaacttcctgtgctttttggaataaaatcttaattaattccatttgacgttgtccacgtttcaagtctgaatcatgatgtctagttctagcaactgctaaagcctcatcaccatttaatttttggtacccttttttaattttaatcttaccagtatcatctgtgtttggctcatttaaatcatatggtacatcatagtatatgccaccaagttcatttacagcttctacaaaggccttcatattaacgcgtacatagtaatcaacaggaacattcatcgttgcttcaacagagtccattgctgcaattggaccaccatatgcatgtgcatgggtaatcttatcgtaatagccgactttaggaatgtagctgattgtatcacgaggaatactaagcattcgaatttggtgtttagattgattaaaagtagttaaaatcatagcgtctgatctagagtgttcagcatcttggcctttttttcttcttccgtcattatcatcgatacctaagaagagaatagagataggttgttcttcaggattgactttattgtctcgtaaatttgattgacgattagcatttttactatcttgagaagattcaaatgcatcttgagacgttttaaaaagtaacgtagcgaagacaattggaacaacaataagaaccaatgctagaaggatcaaaaagtattttaaaaatttattcatgattgatgctcctatattaaatttttgttaaatcataatcataattttaaaatataattagttgaacgatatttatacaacttcattactaatacattatagccttaaattgtagtactttatagtaaaaaatacaaatgttatgtcaaagttccttgtaatttgaatgttttgttaaaatcaaaaagcattttaaaaaatataatgcgactttagtatgatgtcttaaaaaaattaaaggggtaatataaatttgagtgatttatacaatgtgataaggtataattaaatttgttgtaataagagcttatatgaagaaaatattactaagtagtataacgtataagtgggtgacagatgaaattgtaagttatattataacgaagttaagtttattgttttaattatttaatttgaatacaatgagaggctattagcgaatgaaatttaataaagtgaaattggttatacatgcgtgcgtgcttttgttcatcattatctccataggattagtttttcatcgattacaaacgaaaacgaactctatagaacctatacataaagaaacaaaattatcggataatgcgaaatatttggttgatcgtaataaaggcaaaggtgagccatcgaaattaaaggaagtatacaatagtaaagatccaaagtataagaagattgaccggtatttacaaaattcattatttaatggttctgtagcggtatatgaaaatggcaaattgaaaatgagtaagggctatggatatcaagattttgaaaaaggaattaaaaatacaccaaatacgatgtttctaattggttcagctcaaaaattttcaacaggattactgttaaaacagttagaagaagaacataaaattaatattaatgatccagtaagcaaatatattccatggtttaaaacatctaagcctattcctttaaaagacttgatgctgcatcaaagtggattatataaatataaatcttcaaaagactataagaacttagatcaagcagtgagagcaattcaaaaacgtggcattgatcctaagaaatacaaaaagcatatgtataatgatggaaattatttagtgctagctaaagttatcgaagaagttaccggcaaatcatatgccgagaattactatactaaaataggtgatccattaaaacttcagcattcggcattttatgatgaaaaatcatttagaaaatattttgcaaaaggttattcttataatagtacaggactttctttcttgaagccaaatgttttagaacaatattatggtgcaggtaatatatacatgacaccaacagatatgggtaaattaattactcagatacaacaatataaattatttagtcctaaaataaccaatccattattacatgagtttggtacgaaacagtatccagatgaatatcgatatggtttctatgttaagccaacattgaatagacttaacgggggattcttcggacaagtctttactgtttactataatgataagtatgtagttgtgcttgcattaaatgtaaaaggaaacaatgaagttcgaatcaaacatatttataatgatattttaaaacaaaataaaccttataatacgaagggtgttattgttcaataattaatatagaagatataacttgtatatggcattaaggcattgaccttatttgactagtatacgagttatatcttcttttttatagaggtgaaaagtttaaaggataaggttgaagtagtagggtgataaatttgcgttaagttaaaaagatataaacaattgatgtgactgtcaatataaaaatgtacataaatgattgtataagaatgtattaattgaatggataataatgattgtcttattagatatagaaggggacttaaccatttaaaaattgaaagataataaaaaccagctaacaaaagtgttagctggttaaactttacattattaaaatgtggtttataagtgtgaagagtgaccgccttgcataacccaatatgttccgacaacgaaacaaagtgtgattacaagagcaaagataactttgaatgtttgtaaacgtccatctttaccttcagttaaatgcatgaacattaataattgaagtccagcttggatgaatgcaaagccaaagataattgtcaacttcgcgtggaatgttaatgacgtgtatagtgttacgtaaactgctaaaagcgttaatacgatagatgcgataaatcctacagtatgtttcattattgtactcatccgctatacaccatccctatcatatatacggcagtaaagatgaaaacccaaacaacatctaagaagtgccagtataaacttactataaataattttggcgcattatatttgtctaatccgcgtcgttggatttggattaataaacaaatggcccaaacgatacctagcgatacgtgacaaccatgcgttcctaataggataaagaaactagaccagtaagaaccaattgttgggttaacgccttctgatgcatagtgtgcgaattcataaatttcgaatccaacaaagactaaacctaaaagtaacgtaatgatcatccaaaacatcattaacttttgtttttcttggcgcatgtagtaaatagcaataccacatgtgtaagaactgaataataatgcaaacgtcattattaaaacaagaggcaattcaaataactcagtagtcattttacctgcataatcgccaccatgttgcaaagttaatagtgtcgcaaatagggtaccgaataacgcaaattcggctgtaatgaaaatccaaaagccaagcttatttaattcgccttcatgtgtgcgtgaatcaatagtgtttgtatcatgactcatgacttacagcctccctttctttaatacgcgcttctcttaatctagcttcagtttcagcaacttcagcagcagggatatgatatccgtgatcgatttggaaactgcgataaatcatagtaccaaaaataccgaataaacaaattaatgctggaattacagtttcgaaaattaagaagaaaccgccgatagtcataaagataccaatccagaatccaacaggagtattgtttggcatatgaatgtctttgtaattatggttgtctaaataatgacgaccatgttctttcatatcaacaaatgtgtcgtagtcattccaatctggtgtaatggcaaagttgtatttaggtggaattgctgatgcagtagtccactctagagtacgaccaaggccatcccagttatctccagttgcttcacgtggagatttgaagtgactgtatacgatactaacaacaaggaataagaatccgattgccattaataatgcaccgatagttgaaattaagtttaataagaaccaaccatctgatggcatataagtgtataaacgacgtggcataccatctaatccaagaatgaattgtggtaagaaacaaacgttaaatccgatcatgaagaaccagaagcaccatttgtttaatgtttcgtttaatttgtaacccatcatctttggataccagaagattaaaccagctaagcaggcaaatacaacaccagtaaccaatgtatagtggaagtgagctactaagaagtacgtattgtgatattgatagtcagcagatgccattgctaacattacacccgtaacaccacctaaaaggaagttagggataaatgctaatgagaataacattggtgactcaaatgtaatacgtcctttatataatgttaataaccagttaaacaatttcacaccagttggaataccaatcagcattgttgaaattgagaagaatgagttgattaacgcaccattacccattgtgaagaaatggtgaacccaaactaagaaactaaggaaagcgataccggcagttgcccataccatactttgatgtccgaataaacgcttacgagcgaatgtcggaataatttctgagtaaataccaaatgctggaaggataacgatataaacttcagggtgcccccatacccagaagaagttagcccaaagcattggcataccaccatgtgcaactgtgaagaatgctgtgtcaaatattctatcagttgtcattaatgctaacgctactgttaaaggagggaaagcaagaataacaattaatgtagtaataaatgttgttactgtaaacattggcatttgcataaacttcatagttggtgttttacatcttaaaattgttacaaagaagttgatacctgtagctaaggtaccaagccctgaaatttgtatagctattaagtaatagttaacacccggaccaggactgaattcacctgctagtggcgcatagtttgtccaaccagctgctggtgaaccaccaataataaatgacaggttgaataaaatcatacctgcaaagaatagccagaaacttacgttgtttaatactgggaatgcaacatcacgtgctccaatttgtaatggaacaacgatattccataaaccaaagataaatggcattgccatgaagataatcatgattacaccatgtgtactaaaaatttcgttatagtggttagattctaaaaatttgttatcaggtactgttagttgcgcacgaataagtaacgcatcaataccaccacggacgaacattaatacggcacagattaaatacataataccgattttcttatggtctacagaagtgaaccattctttgtaaagatatttccataatttaaagtaagtaattactgcgattaaaccaataactaagaatggggcaccaatttgtgccattgtaatcatccagttacctttaactagtaattgatcccatggaaaattcattaatgtccacctccatgatcatcattgtcttgatcttgcgcatcttttgaaattttcttcatttctttcgcatttttcgattcatctttcttgaactcattgttatatggttcgtcatttccaagaatcatcaatttcataccatgtcgtttatagttcgcatttgtaatttgagctttacgagcaggtattaatggtttgtctgatacatctttaaacatattttcttcactagtgaagtttggatctttcaattcgaaattgaaacgtttatatgcatagaagatgtattctggatcggctgctggatcaacaaacgccatatgtgtaccattaaattctaaagctttattaggtgtgcttggtaataattgtttatcaaatgtatcttgatctaacgttttcttacctttaacttctttcacccatttgtcgtagtctttttgactaacggcatttactttaaatgtttgacgcgagaatccttcaccattgaagttagaattacgacctctgaacgtaccagtttgagatgcttctaacgtccaattcattgtcatgccagtcatggcatatttttgaccacctaattgtggaatccagaaacttgtcattgtatccatagcttgaagcttaaatacaacaggacgatctttagggattgttaatgtattaacagtctctatatgttcatctggataagcaaagaaccatttgtatcctgcacttactgcatatacaaccattggatctttctcactcttcggtggtttttcgtaatcgtataaagttttaactgtaggaatagctaaagcagcaacgattatgataggtattacaaaccatattgtttcaatgatggcattatggtgcatcttaccagattcggcattcttattataactatacttgtaaataaaaatggcgaacatgccaagtacaacgaaacaaataacaagcatgaagacgattgaataaagaatcaagaacttctgactacttgctactggcccttttgcgttgaaaatttctatatttgaacaaccactaagtaaaattagtgtgccaaataataaaagcaaagacttaaattttgacacttttttgacctcctaatactacaaatgtagggcttaacattaattttaagttattacacaatatttacaagggcttatgggaaaaaaattaataaaattgtatcaaaaatgttgataaatcaaggtgtgacgtgggttcacacatttgttaaaattatgtgtacattttgtgactaatagcgtttttgaaaaaattgcttcatatttaaaagggaagttgagaatagctttcaattaaaggttaattgaatgaaaataaaaaaagtttgaaattgtctaataaattgaaaatgatggctagttcattgaaaggaagcgcaaacattttaatgaggaatttgccaaaagtaatttatcgttaaacaatgaaaagaggaaatttgtttgttcaaaatcaaaacattcttttaaaaagagcagttaagttttaataatttgataggtagtcctttggtatacagaaaaaatacaatatttgggttaaagttgcagatgaagttggaataacaaataaaatggtagcaaaacatgtacgtttgctaccattttatttgcagtatagtgatgagggctatttaacctcaatatacctagtggaaattttaattgcaccatctgaatcagtgacatgatatttaatttgatatttaccagatttagatgtatcaatttggccatcgactttaattttatcggttaaatctccatcttctttatcaaatgcacttatgccgtttagaaggttataatcttgacctttcttaataacgatatcattagcgcctttaatttgtggtgtagtattcgtcgttgcatctgcatttaaatttggtgttactagtgtagcagaaacaccgagggctgataatgactgtaatagtttattcataatgtaacctccgaatgataagtcatttctgagttagctttactataccttaatttatattatttacacatcatactatagtcctaatcttaccctataaagaatgaaatttaaatataaatttataaataatgaggaaataattattattttgaaaatctgccacaattgtaaaattaataattcagggataatttgaaatcaaatataactttattcgacagtttgaacttaaattgttgtgcatcataacaataagaaaagggaggcaaaaataataaagaaccactaatgatttattatgtagtagtattttatcattagtcacagcttctgtgttggggactcgctgacttgcattgtctgtagaaattgggaatccaatttctctgtgttggggcccatccccaacttgtacattattgtaagctgacttttcgtcagcttctgtgttggggcccacaccccaacttgcattgcctgtagaatttctttttgaaattctctgtgttggggcccctgactagaattgaaaacttgttacaagcttaatttcatttaattaactattgtctatataaaattgttgagcctagaacaatgtgaaatgctcccttcaaagccttcatttattcaatgtctactttgaagggagcatttgatcgattaatgtcccagatttttcttgttattcattgcaattgcaaaataatatttaatttgggttaaaagagttcattaaaactcatttattaattcacattacataacttatgtgaatttacgaatcaatacctcgacgcattttttctgcaagcaaagtattatttaataccatagtaattgttaatggaccaacgccaccaggaactggtgtaatagctccagcaatttctttaaccgcatcataatcaacgtcaccttttaatttgccattttcatctggcgtattgccaacatctataattactgctccttctttgacaacatcttttgttactaaaccaggcttaccaactgcactgacaatgacatcagcatcttttaaatatgatgccatatcctttgaacgagaatgtaagattgttactgatgcatttttttgaagtagtaacttagaaactggttgtccgacaatatgacttcgtccgattacaactgcatttttaccttctaaatcaatatcagcatgttttaatatttccatgatgccgagcggtgtgcaaggtacaaaagtttgttcgtcgatatataatttccctatatttattggatggaaaccgtccacatctttatcaggattgattgcttctaatattttctgttcgctaacttgttttggtagtggtacttgtaccaaaataccacttacagaatcatcattatttagtctgtttagttcgtttaatacttcttcttcagtagctgtttcttccaaatgtacgatttctgaaatcataccaattttttcagctgctttcttttttgatctaacataactttgactagcgccatcattaccaactaatataacggataatttaggtgtaaaacccttttcttttagcgcttcaacttgattttgtaacccctgtctgtagtctttggcaatttgtttaccatctaaaattttagcaaccataaaaacttctcctcctattgtcaatatcctaactttgttagtttataaaactaatttacatagcaaaagacgtaaattcaaacaaaaaatcaaaataaagttcgatttttgattgaaaaagcagaaattgcttgttatgctatatctataatatacaactaaagtaattcacaattcaaacttttgaaagggtgtacaaagtgaaagtagcagtcattatgggcagttcttccgattggaaaattatgcaagagagttgtaacatgttggattattttgaaattccgtacgaaaaacaagtagtatccgcacatcgtacgccaaaaatgatggttcaatttgcttctgaagcgagagaaagaggtatagacattatcattgcaggcgctggcggtgcggcacatttaccaggtatggttgcatcattaacgacgctaccagttattggagtgccgattgaaacaaaaagtttaaagggtatagattctttattatcaattgttcaaatgccaggaggtattccggttgcaacgactgcaattggtgcagcaggtgctaaaaatgcaggtatacttgcagcaagaatgttaagtattcaaaatccttctttagttgaaaaactaaatcagtatgaatcttcgttaattcaaaaagtggaggacatgcaaaatgaacttcaataaattaaagtttggtgcgactattggcattattggtggtggtcagcttggaaagatgatggcacaatcagctcaaaaaatgggttataaagtggctgtattggatcctgctgaagattgtccatgtagatacgttgcacacgaatttatacaagccaagtatgacgatgaaaaggcactcaatcaattaggacaaaaatgtgatgtgattacttatgaatttgaaaacatttcagcccaacaattaaaactattatgtgaaaagtacaatattccgcaaggttaccaagctatacagttattacaagaccgcttaactgaaaaagaaacattaaaaagtgctggtaccaaggttgtcccattcatttcagtaaaagaatctaaagatattgacaaagcaattgaaacattaggatatccttttattgtaaaaactagatttggtggctacgatggcaaaggtcaagttttaattaacaacgaaaaagacttacaagaaggtattaaattaattgaaactagtgaatgcgtagctgaaaaatatttgaatatcaagaaagaagtatcacttactgttacaagaggaaacaacaatcaaatcacttatttcccattacaagaaaatgagcatagaaatcaaatacttttcaaaacaattgttccagcgagaatagataaaatagctgaggcgaaagagcaagttaataaaattatccaatcgattcatttcattggaacatttacagttgaattttttatagatagtaataaccaattgtatgtgaacgagattgcaccaaggcctcacaattccggacattattcaattgaggcatgtgattattcacaatttgatactcatattttagcagttaccggacaatcattaccaaattcaattgaattattaaagcctgcagtcatgatgaacttactaggtaaagacttagatttattggaaaatgaatttaatgaacatccagagtggcacttacatatttatggtaagtctgagcgtaaagatagcagaaaaatggggcatatgactgtactaacgaatgatgtaaaccaaactgaacaagatatgtacgctaaatttgaggggagtaattaaagcgtgacattactatatgaaggaaaagcgaagcgcattttctcaacaaatcaagaaaatgaattaagagttgaatataaagatgaagttactgctggaaacggggctaagaaagacacaatggcaggtaaggggcgattaaataatcaaattacttctattatatttaaatatttacaagaaaatggaatagaaagtcactttattaagcaattatctgaaacagaacaattagttaagcctgtgaaaataattccattagaagtagttgttcgtaatattgctagcggatctattacaaagcgtttaggttttgaaaatggtgaagtttttagagaaccacttgtggaatttttctataaaaatgatgcattaaatgatcctttgattacagatgatcacatcaaattactgaatattgcgacagataaagatattgaaacattaaaaacgaaagcgctagaaattaatcaagtattaaaacaattaatgcatgcgatgaatttaaaattagtagattttaaaatcgaatttggaaagactgagactggtcaaattttgttagcggatgaaatatctccagatacatgtcgaatttgggataaagctaccaatgcaaactttgataaagatgtatatagaaataacactggatcactgattgaaacatatcaaatatttttaaacaaattggaggatttaaaataatgaaaacaattgaactacatatcacattacaaccacaagtattagatacgcaaggacaaacgcttactcgagctgtacatgatttaggttatgcacaagtgaatgatattcgtgtaggaaaagtattatatatgacagtggatgaggttagtgatgaaaaggtacacaacattattacaactctaagtgaaaaattgtttgcaaatacagtgattgaagaatatagctataaagttttagaagatgaaaaggagaatgcataaaatgaaatttgcggttcttgtttttccaggttcgaattgtgatagagacatgtttaatgctgctattaaaagtggtgttgaagcggaatatgtagattatagagaaacatcactaagtggatttgatggagtacttattcctggtggattttcattcggggattacttaagatctggggcaatggctagtgtagcgccggttatttctgaagttaaacgtcttgcagctgaaggtaagccagtattaggtgtttgtaatgggtttcaaattttaactgaaataggtttattacctggtgcattattgcataacgattcacatttatttattagtagaaatgaagagttagaaatagtgaataatcaaacggcttttacaaatctttatgaacaaggtgaaaaagttatatatcctgtagctcacggcgaaggtcattattattgtactgatgaaatatatcaaaaattaaaagctaacaatcaaattattctgaaatatgtgaataatccgaacggttcatatgacgatattgcaggaattgttaacgaaaaaggcaatgtgtgtggcatgatgccacatcctgaaagagctttagaaacgttgttaggtactgatagtggtgtgaaattatttgaagcgatggtaaaaagttggagggaacaacatgtctaaatttatcgaaccaagcgttgaagaaattaaacttgaaaaagtatatcaagatatgggattaagtgatcaagaatatgaaaaagtttgcgatattttaggcagacaacctaactttacagaaacaggtatcttttctgttatgtggagtgaacattgctcttataaacattctaaaccgtttttaaaacaatttcctacgtcaggtgagcatgtgcttatgggtccaggtgaaggtgcaggggtagtcgatataggtgataatcaagccgtagtatttaaagtagaatctcacaatcatccatcagcaattgagccatatcaaggtgctgctacaggcgttggtggaatcattcgtgacattgtctctattggggctagacctattaatttgttaaacagtcttagatttggagaattagataataaacaaaaccaaagattacttaaaggtgttgtaaagggtatcggaggttatggtaactgcattggtattccaacaactgctggagaaatcgaatttgatgaacgttatgatggtaatccacttgttaatgcaatgtgtgttggtgttatcaatcacgacatgattcaaaaaggcacagcaaaaggtataggtaattcggtcatttatgttggtttgaaaactggtcgagatggtattcatggtgctacttttgcatctgaagaattgacggaagaaagcgaaagtaaacgaccttctgtacaaatcggtgatccatttgtaggtaaaaaattaatggaagcaacacttgaagcaattacatttgatgaattagttggtattcaagatatgggtgctgctggtttaacatcttcatcttctgaaatggcggcaaaaggtggtagtggtttacatttgagattagaacaagtgccaacacgtgagccaggtatttctccttacgaaatgatgctttcagaaactcaagaacgtatgttactagttgttgaaaaaggtactgaacaaaaattcttagatttatttgataagcacgaattggatagtgctgttataggtgaagtaacagatacaaatcgttttgttttaacatatgaagacgaagtttatgctgacattccagttgaaccactagctgatgaagcacctgtatatattttagaaggagaagaaaaaaattataatacttctaaaaatgattatacacacatcgatgttaaagatactttctttaaattacttaagcatccgactatagcatctaaacactatttatatgatcaatacgatcaacaagttggtgccaatacgataattaagccaggacttcaagcatcggtagtacgtgtggaaggcacaaataaggcaattgcttcaacaattgatggtgaagcgctttatgtatataacaatccatatgaaggtggaaagatggtagtagctgaagcttatcgtaatttaattgccgtgggtgcaacaccattagcaatgactgactgcttaaattatggttctcctgaaaagaaagaaatttatcaacaattagcagattcaacgaaaggtatggcagaagcttgcgacatacttaagacacctgttgtttctggaaacgtttctttatacaacgaaacgaaaggcacttctattttccctacaccaattgttggtatggtaggtctgattgaaaacgtagactatttaaatgattttcaacctcaagttggagataagttatatgtaattggtgatactaaggacgactttggtggtagtcaacttgaaaaattgatttatggcaaagtaaatcacgaatttgaatctatagatttgagttcagaagttaaaaaaggtgaatcaatcaagaccgctattcgtcaaggggtattatcacatgttcaaacggttggtaaaggtggcttactgattaccttagctaaactaagtgcgcattacggtttaggattaaagtctttaatagatataacaaatgcacaattgtttagtgagacacaaggccgatatgttgtttctgttaaatcaggtaaaactttaaatattgataatgcaatagaaattgggcttttaacagatagtgataatttcaaagtaacaacaccatatacagagattagtgaaaatgtttcagatattaaacaaatatgggaaggggcaattgctcaatgtttaactactcaggattaaacgaagaatgtggcgtgtttggtatttggaatcatcctgaagcagcgcaactaacatatatgggacttcatagtttgcaacatcgtggtcaagaaggtgcaggtatagttgtttctgatcaaaatgaattaaaaggcgagcgaggattaggcttactaactgaagcgattaaagatgaccaaatggaacgattaaaaggatatcaacatgcaattggtcacgtccgttatgctacttcaggtaataaaggtattgaaaatattcaaccgtttctgtatcacttttatgatatgagtgtaggtatttgtcataatggtaacctcattaatgctaaatcattacgtcaaaatttagaaaaacaaggtgctatcttccattcgtcttcagatacagaagttattatgcatttgattcgacgcagtaaggcgccaacttttgaagaagcattaaaagaaagtcttcgaaaaattaaaggtggttttacatttgcaattttaacaaaggatgcgttatatggcgcagtagatccaaatgctatcagaccacttgttgtaggtaaaatgaaagatgggacatacatccttgcaagtgaaacatgtgcaattgatgtgttaggtgcagaattcgttcaagatattcatgcgggtgaatatgtcgtgattaatgataaaggtattacagttaaatcttatacacatcatacgacaactgcaatttctgcgatggaatatatttattttgcgagaccagattcaacgattgctggtaaaaatgttcatgcagtgcgtaaggcttcaggtaaaatgttagcacaagaaagtccggtaaaagctgatatggtcatcggtgtacctaattcatcattatctgcagcgagcggttatgctgaagaaatcggtttgccatatgaaatgggactagttaaaaatcaatatgttgcaagaacatttattcaaccaacgcaagagttacgtgaacaaggtgtaagagttaagctatctgcagtgaaagatattgtagacggtaaaaatattattcttgttgatgattccattgttcgaggtacgacaattcgacgtattgtgaaaatgttaaaagattctggtgcaaataaagtgcatgtgcgtatagcatcaccggaatttatgttcccaagtttttatggaatcgatgtttcaactacggcagaattaatttctgcaagcaaatcacctgaagaaattaaagattatattggcgctgattcgttagcatatctatctgtagatgggttaattgaatcaattggtttagattatgacgcgccatatagtggcttatgtgtagaaagtttcactggagattatcctgcagggttatatgattatgaagcaaattataaagcacatttaagtcatcgacaaaagcaatatatttctaaaaacaaacactattttgatagcgagggaaatttaaatgtctaaagcatatgaacaatctggtgtaaatattcatgctggttatgaagctgtagaaagaatgtctagtcatgttaaacgtacgatgcgtaaagaagttatcggtggtttaggtggattcggtgctacatttgatttatcacaattaaatatgacagcaccagttttagtttctggaacagacggagtaggtacgaaattaaaactagctatcgactatggtaaacatgattcgataggtatcgatgcagtcgcaatgtgtgttaatgatattttaacgacaggtgcagaaccattatattttttagattacattgctacaaacaaagttgttcctgaagttattgaacaaattgttaaaggtattagtgatgcatgcgttgaaacgaatactgcacttatcggtggagagactgctgaaatgggtgaaatgtatcacgaaggcgaatatgatgtagctggatttgctgttggagcagttgaaaaggatgactatgtagatggttcagaagtgaaagagggacaagttgttatagggcttgcgtcaagtggcattcattcaaatggatacagtttagtgcgcaaattaattaatgaatcaggcattgatttggcatcaaacttcgataatcgtccatttatagatgtctttttagaaccaactaaattatatgttaaacctgtacttgctttgaaaaaagaagtttctattaaggcaatgaatcatattactggtggaggtttttatgaaaatattccacgtgcattgccagccggatatgctgctagaattgatactacatcatttccaacgccaaaaatatttgattggttacaacaacaaggcaatatagagacaaatgaaatgtataacatttttaacatgggtattggctatacggttatcgttgatgaaaaagatgcaccacgtgctttgaagattttagcagaacaaaatgtggaagcctatcaaattggtcatattgtgaaaaatgagtcaactgcaattgaattgttgggggtataacaatggttaaaattgcgatttttgcatcaggttcaggaagtaactttgaaaatatagttgagcatgttgaatcaggaaaacttgaaaatattgaagttacggcgctatatacggatcatcaaaatgcgttttgtatagatagagcaaaaaagcacgatattcctgtttatattaatgaaccaaaacaatttggttcaaaagcagcgtatgaacaacatttagtaacattattaaatgaagataaggtagagtggattattctagctggctacatgcgtctaattggtccagatttattagcttcatttgaaggtaaaatattaaatatacatccatcactattgccgaaatataaggggattgacgcaataggccaagcatatcatagtggcgatactattactggttcgacagtacattatgttgatagtggtatggatacgggagaaattattgaacagagacaatgtgatattagaccggacgattcaaaagaacaattagaagagaaagtaaaaaaattggaatatgagttatatccaagtgttattgctaaaattgtaaaataaggagtatgtatgtgatgaagaaagctattttgagcgtatcaaataaaacaggtattgtagagtttgctaaagcgttaacgcaattaaattatgaattatattcaactggtggtactaagcgtatattagatgaagcaaatgtaccagttcgttctgtttcagacttaacacattttccagaaataatggatggccgtgttaaaacattacatccagctgttcatggtggtattttggctgatcgaaataaaccgcagcatttaaatgaattatcagaacaacatatagatttaattgatatggtagtagttaatttatatccattccaacaaactgttgctaaccctgatgtgacgatggacgaagcaattgaaaatattgatattggtggtccaacaatgttacgtgctgcagctaaaaactataaacatgtaacaacaattgtacatcctgcagattatcaagaagtattgacgcgattaagaaacgattcgttagatgagtcatatagacaatcattaatgatcaaagtttttgagcatactgcagaatatgatgaagcgattgtacgtttctttaaaggggataaagaaactttaagatatggagaaaatccacaacaatcagcgtattttgtgagaacttcgaatgcaaagcacacgattgcaggcgctaaacaattacatgggaaacaattaagctataacaatattaaagatgcagatgctacactagctttagttaaaaagtttgatacacctgctgcagttgcagttaaacacatgaatccatgtggtgttggtatcggtgacacgttagaacaagcatttcatcatgcgtatgaagcggatagtcaatcaatatttggtggaattgttgcattaaaccgagctgtaacacctgagttagcagagcaattgcatagtatctttttggaagtcattattgcaccaaaatttacagatgaagcattaaatattttaaaacaaaaaaaaaatgtaagattattagaaattgatatgactatagacagtaacgaagaagagtttgtttcagtatctggcggatatttagttcaagataaagacaattatgtcgtgccaaaagaagaaatgaaagttgttacagaagttgcacctactgatgaacaatgggaagcaatgttattaggatggaaagttgtaccatcagtaaaaagtaatgcaattattttaagtaataataaacaaactgtaggtataggtgctggacaaatgaatcgtgtcggtgctgctaaaattgcgttagagagagctattgaaatcaatgatcatgtagcgttagtatctgatggatttttccctatgggagatacagttgaacttgcagcacaacatggtataaaggcaattatccaaccgggtggttcgattaaagatcaagattcaattgatatggctaataaacatggtattgcaatggtagtcacaggcactcgacattttaaacactaattttaaaggggcgtaacataaatgaatgtattagtaattggtgctggtggacgagaacatgcacttgcatataaacttaatcaatcgaatctagttaaacaagtgtttgtcattccaggtaatgaggcaatgacacctatagctgaagtacacactgaaatttcagaatctgatcatcaagggatactagattttgctaaacagcaaaatgttgattgggtagttataggtccagaacaaccgctaattgatggattagcagacattttacgagcgaatggtttcaaagtgtttggtccaaataagcaagcagctcaaatcgaaggctcaaagttatttgctaaaaagataatggaaaaatataatattccaactgctgattataaggaagtagagcgaaaaaaggatgcattaacatatattgaaaactgtgaattccctgttgttgtcaagaaagatgggttagctgctgggaaaggcgttattattgcagatacaattgaagcagccagaagtgctattgagattatgtatggtgatgaagaagaaggtactgttgtgttcgaaacgtttttagaaggtgaagagttctcgctaatgacatttgttaatggtgaattagcagttcctttcgactgtattgcacaagatcataaacgcgcatttgatcatgatgaaggaccaaatactggtggtatgggggcttattgtccagtaccacatattagtgacgatgttttaaaacttacaaatgaaacaattgcacaacccattgcaaaggcaatgcttaatgaaggttatcaattcttcggtgtattatacattggtgctattctaactaaagatggtccaaaagtaatagaatttaatgcccgttttggtgatcctgaagctcaagtattattaagtcgcatggaaagtgatttaatgcagcatattattgatttagatgaaggaaaacgtactgaattcaaatggaaaaatgaagctattgtaggggtcatgttggcatcaaaaggatatcctgatgcatatgaaaaagggcataaagtaagtggctttgatttaaatgaaaactattttgttagtggattaaagaagcaaggtgatacctttgttacttcaggtggtagagttatacttgccatcggaaaaggtgacaatgtacatgatgcacagcgagacgcatacgaaaaagtatctcaaatacaaagtgaccatttattctatcgtcatgacattgcgaataaagcactacaacttaaataagtatatttaaaaatactaagattagctatgaacgaatctataacgatagatttgttcatagcttttttagttgtagagtctaggacattgatttctgtaccaaatttgtgattatcatatgttgtaatacaaaagaggcgccacaacatgtttggatgaacaaaataacatgtttgtggcacctcttttgtttagtatggaataaatggttttctttttctatacaatgaatttctaatttagtatctatacaattatggataaaatttaacctacacgaccaagacgaacatcatcaatgcccgtgatgggtaaggtgattgaacaataatatgccaaaataataatggcaattaaaactataataaagattacatctttatatgagaaaggtacgttgtaatagtaagtacgaggaccatctctaaatcctttcgactccatcgcaactgataattgatgtgcctttctaatgttttgacttaatagaggtatgattaaatgcttaaatcgctttaatcctctataatttgctgcgtctatcatctgatagcgcatttttaaagatctgcgaagctgtattaaagaactaatcattaaaggtatcatacgaatggcagccatgaatgcataagcaacttttgatttaacctttaaatgttgcattaaactataaaaaatcatgacaacctgagatgtgagtgcgattaagataccgaaaaatgaaatagcaatagttcttaatgatacatgtaaaccacgaactaaactttctgttgtaatatggataaatccgaatttcaaaattgtatggctaccattcccgtataaaatcatgaacagggaagagagtaatgcaaagccaatacttatagttataaaaattgctgtaattttaaactgagtaccattaaacatcaataagaaaactaacattaagatagtgatataaagcataaaatcgaaattatgcacaaatataataaagaaaaatagtataattccaagaaatagtttcgttataatgttgacatcatcaacaaatgattgccgaaccttccattgctcatacattcgtatcaccatcacaatctagtaacgcaccatctgaaattttaagtcttcttgatgggtaacgttcaattatttcatcatcatgtgtaaccatgacaatactttgtcccaaattaattcgtttttggaaaagtttgatcaactggaatgtattatggctatcaagtccaaatgtcggttcatctaaaaagatgatatcagctttagaacttagtgcggtagctacgctaaggcgtcgtttttgaccaatagacaactcataaggatgttgatctttaacattttctaaatctaaaagttttaaaagttgtatcgtttcatcatcactttgatctttagaaaggtgattaaaatgaatgttaatttcatcataaaccgaatttgttataaattgtaactctgggttttgataaactagatacatgtgttttgctgcatgtttaatttttgttaaatgctgattttcaaaataaacatcaccttgatatttaatcaattgcataattgattcaagcaaggttgttttaccactaccatttgcccctgtaattgtaatccactcacctagaccaatttctaaatctgagaatgagagcaacgttgatttaccgcgaataatacgtccatttttaaattgtaataagtgtgagtttgttgttggaaagtcaacacgacttggtgcgaattcccatgcacgtggatgccacacaccatattcactgagtaaatgaacatacttctgtaatatgatttcaggacattcatcggcaatgatatttccgttataatccatcaaaatgacgcggtcgacatgattccagatgtgtttaactttatgttcaacgattacaacagtttgatcttcccaaagttcaattagtttagtccataaatcttccgttgcttgaacatctaacattgctgtcggttcatctaaaaacaatgtttttgattgttgaagaatggtttcaacaattgccaatttctgtttcatcccgccacttaaatctttgatatacgtttcaggggtaacatttaaattgaccatatttaaagcattgataattaacgcatccatgtcttcacgtggtacttgtctattttctaaaacgaatgcaagttcttcgtatacttttggcatacaaaactggctatcagggtcttggaaaataacgccacttaatgggtcaacgattagttcatcatatttcataggtaattcaattaaattaggaacaataccacttaatacattcagaagtgtacttttaccgcaaccagaaggaccgagtaaaagtactttttctttgtcttgaatagtgatatttaaatgatcgaaaattttacgctgaccacttggatattttaatcgtaaatcacttacttttaacactctgaatgctcctcttataagttgtcgtaatcttctttagcagctggcctaaataattttgttacgcctgtcttatctaaagcttttactaaaaggtaagataggacgccggcgactactgcaccactaattaatctaaatacgatgaataatgttaagttccaacctgcaacttcatttaaataaccatagaaataatcgatcgggaaagccgcgatagctgtacaaaaacctgctaacatagctaccataactgaacgagattgatatttaaaaattgcaaagacaagttcacacgctaaaccttgtatgaaagcgtaaacgattgtcggaatatcgaaacgacccataatgatagtttcgccggcacctgcagcaaattcagccaataaagcaatacctggttttggaataattagatagcagacaatcgctgccatgaaccaaaccccgtttgttaattgttcgaggtgaaggcctgtagcttgcacaccattgtaaacaaaccaccataaattgtaaataactgcgaatactactgaaataagtacggttactagaatttcagatagctttaaaccttttgacatttttacatcctcctaataaaaaaacgcacaaccatccataggaaagttatgcgttcacaatatatattagtaaaacatatgtatagtaacactttcctacgctagttcaagctagatcaggttcaaagggtttgagggcaagcctcatctcagtataaaacacccctagtgtgtgcgatttatttaattaattatactgtaagacgtttataaacttatgtcaataggttgtcttcatgaaatttcgtttaattcgatttaaaatttataatattagcattagatttaaattaaagatgtagtagaaatgttagtaattaaagatataaaaatatgtgacatgtaataatattaagttgataagtgaagagggatacttatcaatcatacctctttaacaacagtgaacaacccgtgcataatggcttgtgaattattgtttgtaaggtaaaagagggataccagcggcgagcgcaagcaaaaaagccccaaacaactaaaagttataaggtaaaagagggatacttgcgccgagcgcatgcataaaatcccctaacaacgaaaagttgtaaggggatttaaattaatttagtgtatcttggatatcttgttttgtttgattaatatcttctgttttttcttcttttttatcttttagtttttcttcaacttctttagctttttctgctgcttttttattttgattttcatttgacatgattaattcctcccaaattggataattatttatatataaatcttacccggttgtactttcgttaaacttttctaagtctatagcactatttattcatttatctaaagacaacaacattagattaatatataatgattttgaggtgaacataatgtcttttcttaggaaacacgccgaaattatttttagctatttaatcggtatcgtttcactcttcactggtctcattattttaattaacttgcctttaattaaacaattaaatggtggtaaaaaagttgatacacatgttcataatgtgtgggaatttctgaatgcatttttcagtgaaattattaaagtaatgagtcgatttataggtaatttccctatagttagtgcaattgtgataattatattcggtattttagttatgttgattggtcatacattacttagaactattaagtatgactatgatatttctatctttttcttagttatcggtatcatgtactttattattacgcttatattaatgacgcaagtatatggattctttgcggtaattttcattattccatttacaattcatattggatatatcgtttataaagatgaattgaatcaggaaaatgttaaaaatcattacatgtggattattgtaagttatggtataagttatttaattacacaaattgcattgtatggcagaattgatgctaatgaaatagaatcaattgatatcttaagtgtcaatgctttctttataattatgtggttacttggtcaaatggctatttggaatttcttgttcttgcgccgagctttacctttaacaaagcaagaattaggtgaagaggagccagaattatcaagaacaagtaaagggaatgtcacgaatcaaactaaaattcacttgaagcaactccaagataagactacagaatatgcacgtaagacaagaagaagtgtcgatttagataaaattagagctaaaagagataaattcaaaaagaaagttaatgatattatcgatattcaagaggacgatattcctgattggatgagaaaaccgaaatgggttaaaccgatgtatgtcgaactattttgtggtgtcgtcatctttttattcacatttttagaatttaataatcgtaatgcattatttgtatctggtgattggaaattatcacagacacaatatgttattgaatgggttacattactaattctgctattcattattatcgcatatatcgctacaacgttaactttccacttgaaaggtaagttttattatttacaattatttatggggagcattttattctttaaattgttaacggaatttataaatataatgattcatggacttctactttcagtgttcattacgccaacattactattaatgttattggcaatcatcatttcttattcgttacaattacgagagcgaccataattaaaagcattataaaagtactatctattaaacattttgatgtgtacgctataagttagatatatctctaacttacttagatacaggtcaatgaagtttatggatagtactttttttgtaactagatttgattgattcaggtaatgtgaattaagtattgaaaattgtatacaaagttttagtgcaaataaaatagttgaaaagttatccatttgtaaaattaagaaaactagtaaatagttgaagtgacaagtggaatttgcgaaacgatatatagtatctcatttatagaagtttaacatatatcattcgaattactaatttgttaaaatcaacagtaagattagaagtagatgatattgaaatttggcaaacaatttaatctatataaaactacaacgaaacacagaaaggaagttgtcagatgaaaatagcaactctgaacaaaggcaaagaaacaaaatattttaatggatatcctttaattgaagaagaggatatctattcacaagatcatttaaaagaaggagatatttttcaaattgtgactgataaatcacaatatgttgcaacggcttatgttggtcgccaacataaaggattaggttgggttctaacatacgataaagctcaagaagtcaacacagctttctttgtgaaattgtttaatactgcattagcagaacgtgattattattttaatatagatggaacaaatgcttttagattatttaatgctgaaggtgatggagttgggggattaacgatcgacaattacgatggtcatttgttgattcaatggtactcaaaaggtatttataaatttaaatatgccattcttgaagcggttagaaaggtatttgattataaatctatatacgaaaaagtaagatttaaagacagcgaatatagtggtggttttgttgaaggcgatgcacctgagtttccaattgttatcgaagaaaacttcacattttataatgtagaccttgaagatggtttgatgacaggtatctttttagatcaaaaagaagtgcgcaagaaattaagggatcaatatgccaaagaacgccatgttttaaacttatttagttatacaggtgctttttctgtaatagcagcaagtgaggcatcttcaacaacaagtgtagatttggctaatcgttctcgtagtttaactgaagaaaattttggattaaatgctattgatcctaaatctcaatatatttatgtcatggacacttttgatttctataaatatgctgcacgtcatggacatagttatgacacgatcgtgattgatccacctagctttgcacgcaataaaaaacgtacattttcagtgcaaaaagattatgacaaattaattactggcgccttaaatatcttatcatctgaaggaacattattattatgtacaaacgcaagtgtatatccattaaagcaatttaaaaatactattaaaaagacgcttgaagagagtggcgttgattatgaattaactgaagttatgggattaccaaaagattttaaaacacatccacattataagccatctaaatatttaaaagctgtttttgtaaatattagacattaatttgataaaaaggggtatagtatcttattgagaaaaagaagggtgatgatacaatgggattcaaaaataatttaacatcaaatttaacaaataaaattggtaattcagtttttaaaatagaaaatgttgacggaaaaggtgcaatgccaacgacgattcaagaattgagagaaagacgcgaacgtgctgaagcaattgtaaagagaaagtctttaatgtcatcaacaatgagcgttgttccaattcctggattagactttggtgttgatttaaaattaatgaaagatattatcgaagatgtaaataaaatatacggattagatcataagcaagttaatagccttggggatgatgtgaaagaaagaattatgtctgcagcggcaattcaaggtagtcaatttattggtaaaagaatttcaagtgcatttttaaaaattgtaattagagatgtagcaaaacgaactgcagctaaacaaacaaaatggtttcctgttgtaggacaagctgtgtctgcatctattagttactattttatgaataaaattggaaaagatcacattcaaaaatgcgaaaatgttattaaaaatgtcatgtaggtgctataatagttttgcaatttgcaaattttactgaaaccggttttaaacgaattgaatttaaagcatggttttggtaaagttaaggtataaaactaagttagtattgtaataatattgaagattctaactatacgaaggagaaatgtaattatggaacaaaattcatatgtaatcatcgacgagactggtattcacgctagaccagcaacaatgttagttcaaacagcttcaaaattcgattctgatatccaattagaatataacggtaaaaaggttaacttaaaatcaatcatgggtgttatgagccttggtgttggtaaagatgctgaaattacaatttatgctgacggtagtgatgaatctgacgccattcaagcaatcagtgacgtcttatcaaaagaaggattgactaaataatcatgtctaaattaattaaaggaattgctgcatctgatggtgttgcaattgctaaagcttatttgttagttgagccagacttaacattcgacaaaaatgaaaaagtcactgatgttgaaggagaagttgctaagttcaataacgctatcgaagcttctaaagttgagttaactaaaattagaaataatgcagaggttcaattaggtgctgataaagctgctatctttgatgcacatttattagttttagatgaccctgaattaattcaaccaattcaagataagattaaaaatgaaaacgctaatgctgcttcagcattaacagatgtaacaacacaatttgttacgatttttgaatctatggataatgaatacatgaaagaacgtgcggctgatattcgcgacgtttctaaacgtgtgttatcacatattttaggtgtagaattaccgaatccgagtatgattgatgaaagcgttgttattgtagggaatgacttaacgccatcagatactgctcaattaaataaagaattcgtacaaggttttgctacaaacattggcggaagaacaagtcactctgcgattatgagtcgttctttagaaattccagcaattgttggtacaaaatcaattactcaagaagttaaacaaggcgacatgattatcgtagatggattaaatggtgatgtaatcgttaatccaactgaagatgagttaatcgcttatcaagataaacgtgagcgttattttgctgacaagaaagaattacaaaaactacgtgatgctgatactgttacagttgatggtgttcacgcagagcttgctgcaaatattggtacacctaatgatttgccaggtgttattgaaaatggtgcacaaggtatcggcttatatagaactgagtttttatatatgggtcgtgaccaaatgcctacagaagaagaacaatttgaagcttataaagaagtattagaagcaatggacggtaaacgtgttgttgtacgtactttagatataggtggagataaagaattatcatacttaaacttgcctgaagaaatgaatccattcttaggttaccgtgcgattcgtttatgccttgcgcaacaagatattttcagaccacagctacgtgcattattacgtgcatcagtttatggtaagttaaatatcatgttcccaatggttgcaacaattaacgaatttagagaagctaaagctatattattagaagaaaaagaaaaccttaaaaatgaaggtcatgacatttcagatgatatagaattaggaatcatggtagagatacctgcaacagcagcattagctgatgtctttgctaaagaagtagatttcttcagtatcggtacaaatgatttaattcaatacacattagctgctgaccgtatgtcagagcgtgtatcatatctataccaaccatataatccttcaatcttacgtttagttaaacaagttattgaagcgtcacataaagaaggtaaatggacaggtatgtgtggtgaaatggctggagatgaaacagctattccattattgcttggtttaggtttagatgagttctctatgagtgcaacgtctattctgaaagcaagaagacaaattaatggtttaagtaaaaatgaaatgactgaacttgctaaccgtgcagtcgactgcgcaacgcaagaagaagttattgaattagttaacaactacgtaaaataattaattctttcgaaagacagaattataaataaacccgaagtattcattgtgagtaattatgaatacttcgggttctttttttgatttatgttaatttcaatggaatgttgttgctaactaattaaacaactaggtgtcattgacataaatattgttctttaattaatgttagttaatttaaaaatcgatatttaatttatgatagctaaaaatgatgaagttaatttagatgaaaattaatcttggatatttaatactttgttgatttcatcaagatcaacatggtacattggattgccattcaacaaaataaacggagttgaaaaagcatcaaaatctatcatttcgtttcgatattgttgatttttgatatttctctcttcaaaatcaatttgacgctcatttagataattttttacaaatgtacaaggtggacaatcattctgtgtataaacgattatttctgacatgtatcatgctccttcgtgctttattctaatgtaatatacacaattatacattgaaattcaaatttgtgaacacattgtgaactgacataaattatacacaatttcatagcgcataatgttttaaaaatacacattatagcaattataattaagttcattgtgttgtcatcaaaaaaagaaaaaggtgatgtttttaaatggatacagttgaaatcagtcggtttttgacagctatgactttagcagttcatatcatttttgcaacgattggtgttggtatgcctttaatgttcgcaattgcagaatttttaggtattcgcaaaaatgatcttcaatatatagctatggccaaaagatgggctaaagcttatacaattactgtagcagtgggagttgttacaggtacaattataggacttcaattatcattgatttggcctacatttatggaaatgggtggacacgttattgcacttccattatttatggaaacatttgcgttcttctttgaagctattttcttaagtatatatttatatacttgggaccgttttaaaaataaatggacacatttcttaattagtataccagtaattattggtggctctttctcagcattcttcattacttcagtgaattcatttatgaatacgcctgcaggttttgagttgaagaatggaaagatggtcaatgttcaacctatagaagcgatgtttaacccatcgtttatagttcgatcatttcacgtaattactacagccggtatgacgatggcatttgttattgcatcaatagcagcttttaaattattgcgtaatcgtcaacctaaggatactgtctaccataagaaagctttgaaaatgtctatgattgttggattcttttcaactttactttctatgttggcaggggatttatctgcaaaatttttgcataaattccaacctgaaaaattagcagcttatgaatggcatttcgatacatcttcccatgccaaattattattatttggtgtgttagatgaaaagactcagcaagttaaaggtgcgattgaattacctggactattgagtttcttagcagataatagtgtcaaaactaaagtgcaagggttaaatgattttccgaaaagtttacatccgcctatgatcgtccattatttctttgatttaatggtaacgatgggaattttatgttttgtcatttcaggtgtttatgttttaactttaatgtttaaaaagcttagaaatttttctactcataaatggatgctttacggaatattattaacaggaccagcttcaatgctagctatagaatttggatggttcttaacagagatgggtagacagccttggattgttcgtggttatatgcgcgtggcagaagcagcaacacaagcaggcggaataacctttgttacaattttatttggcatattgtacaccattttaatgtatacatgtgcatacgtattaattcgtatgtttaaaaataaaccggcgtatgaagatgtaaatcgtttagccaagaagcaaggaggagaaatagaaaaatgatttatgcatttataggtataacagtgttatggttgtttttattttgctatatcattattgcttctatagattttggggcaggtttcttcgcattgcattcaaagttaactggtgatgaaaagaaaattaatcacttaatttcacgttatttgaacccagtttgggaagttacgaatgtattctttgttttcttcttcgtaggattcgtaggtttctttccagagtcaatcaaatatttaggcacggtattgttaataccaggttcaatagcactgattatgatatcgttgagaaacagtttttatgcatttgaaaattatggtcaagatacaaaattagcatggatgatcatgtatggggtaagtggattgttaattccagcttcattatctactgctttaactattacagaaggtggttatattaatgttcgaaacaatgttatcgatctagattgggtgcagttactgttaagcccatttgcttggtctgtagtattcttggcaattatttcagttttatatatttcatcaggatttttgacatattatgctaaaaaagcaaatgacgaaccagcatataatttaacaagacaatggcacatatttttagggccaccgatgattatcatttgtttattcgtatttctatcattacgcattcaaaattctgaacatttttattcagctgtttttgactactggtggatgtttgctataagtttcctattctttgcattagcttcattgttaacattctttaagaaaaaacatggtttggcttttgtatttgttattttacaaatgatgttcgcgttctttggctatggaattagtaaattgccataccttttatatccgtttgtaaaaattacagatgcatatgttaatccagaaatgggctggacattagtgattgtctttattttaggtttacttttattacttccatcgttaatattattattaagattatttgttttcgacaaagaatatgttgaaggaaagaaatcataagttgagacgataccccaactttcatttacttgcattactgcatttagataatttagttggggtactcatttataataattttaaatttatattttcaatgaattgatgaaaatcatttaatggagggcgagtatgggtaaagaatatgtagtcatcggtctaggtcgttttggaggtagtatcgttcgtgagttgaatgcattagacatggatgtaatggccatcgaccatgatgaaaatagagtgaatgaatatagtgatatcgctactcatgcggttgttgcagatactacagatgaagcagttatgaaaagtttaggtatccgtaactttgatcatgtcattgtggcaattggtgaaaatattcaatcaagtacgttgacgactttgattttaaaagagttaggtgtaaaaaaagtaactgctaaagcacaaaatgattatcatgcaaagattttaaataaaattggagcagatacggttgtgcaccctgagcgtgatatgggtagacgtattgcgcataatgttgcgagtgcaagtgtacttgattatcttgagttggcagacgagcattctattgtagaattgaaagcgactgaaaagatggcggggcagtctatcattgatttagatataagagcacaatatggaattaacattattgcaattaaacgaggcaaagagttcatcatttcaccaaatccaaatattaatttagaaataggtgatattttaattatgattggacatgataatgatttaaatcgctttgaaaaaaatattgcgacgagataatcgggagtggtacagatatgatattttctcaaaatttatttcgtcgtcccaccccaacttgcattgcctgtagaatttcttttcgaaattctctgtgttggggcccatccccaacttgcacattattgtaagctgacttttcgtcagcttctttgttggggcccctgactagaattgaaaaaagcttgttacaagcgcattttcgttcagtcaactactgccaatataactttgtagagcattgaacattgatttatgtctcaagctcatcatatataaagaaaaagctactaacaatgtgtggtgagtttaattaaaacttcacttcaaagttagtagctttttgattatttattgtttgattctttttgttcgtttaccttcataatgactggtaaaatcattggttttctagctgttttttcaaataaataaggttgtaatgtttcaatgatagaagatttaatctgatgccattgaatatctttattttgatttaacttactaataacatcagttttgattttgcgttgtgcatcataaattaattgtcctgattctctcatatatacaaatcctcgagaaataatatctggaccagaaagtaatttatttgtattaaaatcaatgctaacaacaacgataactaaaccttcttcagataatagcttacggtctcttattacaacattaccgatatcaccgataccactaccatcaacaagtacattaccagatggaatgcgaccagctttacgtgctgaatcgtgtgttaaagctaagacatctccgatatcaaagatgaagacattatcttcttcaacgccgcattcaacaccagtctcaccatgtgcttttaacatacggtattcaccatgaataggtaagaaatatttcggcttgattaatcgaagcattaattgttgatcaccttgagaaccatgccctgaagtatggatgttagaaatcttgctgtggataacatctgcaccagctttatacaaggaattaatcgttctgttaatactttttgtattacctgggataggtgatgaactaaatacaacggtatcttcaggtataattttaatttgcttatgagtaccattagcaattctagataatgctgccattggttcaccttgagaaccagtacatagtattaataactcatgcttcggtacagtattaattttattaggttcaataaatgtttcaggtggtgctttaatataaccaagttccataccgattttaatattgttttccatcgaacgaccgaacgtaacaattttacggttatttttgatagcagcttcaactgcttgttgaactcggtaaatattagaagcaaaggtagcaaatataatacgacctttacaattgcggaagatcttatctacgttttgaccaacttcacgttcgcttaaagtaaaatcaggcacaagtgaatttgttgagtctgaaagtaaacatagaacgccttcttcgcctaattgagccattttagcaatgtttgctggtttgcctacaggtgtaaaatcaaatttaaagtcaccggtatgaactacttttccttcaggtgtatctacgatgacgccataagtttcaggaatactatgcgtagttaagtagaaagaaatcgtaaagtgcttagatttaatcacactgtcctcattgatttcatttagtttagcagtacgtaataaatgatgttcttcaagtttattacggattaaacctaatgctaaaggaccaccataaataggtatattaagttgttttaataggaagggcacaccgcctatatggtcttcgtgaccatgtgttataaataggccaacaattttatcttggttttgaactagatatgtgtagtcaggtataacataatcaatccctaataagttatcatcagggaatttgatacctgcatcgataatgacaatttcgtctttatactcaactgcataagtatttttaccgatttcacctagacctccaagtgcatatacacctacttcatttggatgtaattgtttcattatttagcaatctccacattaaagtgttctgagttttctttttcgtaatctaaatgtgcgccctctaatttagtgataaattcgatattaaaattacgatctttcaagtaacgacgtacttgttcttctgtttgagcttcaacataaagtgattgtgtattttcacgcacaattacctcgtctctgttatgttgataaaaaactttaaatactgccatgttaaaaattcctcctaagaatgtttgtttaatttattgttaaccctagtaaaatcgtattggagtatatatcgataaattcattccaatcatctctataatgtaacttaataacgatttggttaataactaggttcatcatgtcgttcattttaaaaaattagtgaaataacactaaaatttcagttaaatcttattttacatgatgaatgataataaataaagcagtttatctcactagaaatctaagtatttcgaataaatgtgcagttctatttattaaaataaatgtagagattataaattaatgttaagaaagaattaaaggattttatatgaaacggtaaaatttaaatgaggggataaaaagtttggtagaaaggtgaaaatattttactgttattttttaggaaaagttgtaaaagaaaaagcttaggacatcatatttatcctaagctttgataattagtaatagtgtgttttaaacttctacagcatctgtatgtggttgtaatgggtggtctttgtcaatgtgatcatagaacattacaccatttaaatgatcaatttcatgttggaaaacaattgctggatatccttttagtcgtaactgtatatcattaccttcgatgtctttggctttaattgtaattctattatgacggtgaactagaccagcaacattatcatcgacactaaggcaaccttcaccagttggtaaataagcttcttgaacgctatgacttacaattttagggttcacaagcatatagtcataagatttgccactgccatcatctggtattaaaacagcaatcatacgtttagaaatattaatttgaggtgcagccaaaccaacgcctgaacgtaaaccgtaacgtttcgcgatttcctcatcttgactatttactaaaaactctctcatggcgattaatgtttctttttcttctttagttaatggtaattctagctcagctgctttttgacgcaaagttggatgaccatctctaatgatgtctttcattgttaacatatattgcaccttccttattttaatttgttttagttgaatgacagtaaaaaggttgttaagatactcatacatttttatgtgtaagtatgtacaaagttaaccaactactgccaaggtttattttagatagtatatgtaaattttcagatatgctaattgcctaaaaaatgattaaagtgttgatttcaggcaatgatactttagaaatttatttatcgtcttgactttaaaaattatattataaatgacgtaactgtcaacagatatacttagtaatgaagatgtgtaatgtaattgtttaaaattgatttccaagcagattttatttatcatttaatttaaatagcaagtggaggtacaagtaatgaaatttggaaaaacaatcgcagtagtattagcatctagtgtcttgcttgcaggatgtactacggataaaaaagaaattaaggcatatttaaagcaagtggataaaattaaagacgatgaagaaccaattaaaactgttggtaagaaaattgctgaattagatgagaaaaagaaaaaattaactgaagatgtcaatagtaaagatacagcagttcgcggtaaagcagtaaaagacttaattaaaaatgccgatgatcgtctaaaggaatttgaaaaagaagaagacgcaattaagaagtctgaacaagactttaagaaagcaaaaagtcacgttgataatattgataatgatgttaaacgtaaagaagtaaaacaattagatgatgtattaaaagaaaaatataagttgcacagtgattacgcgaaagcatataaaaaggctgtaaactcagaaaaaacattatttaaatatttaaatcaaaatgatgcgacacaacaaggtgttaatgaaaaatcaaaagcaatagaacagaactataaaaagttaaaagaagtatcagataagtatacgaaagtactaaataaggttggtaaagaaaagcaagacgttgatcaatttaaataattaatatgatacagatggtaggaaacaactaatacagttcctgttatctgtatctttttttattaaaacagaactttttcaaatggtttaacagtcccatttatttgtggtacaattagtaaggataaaatgaatttctatacaattatgggaaaggtatggtgaattgaatggctcctaagttacaagcccaattcgatgcagtaaaagttttaaatgatactcaatcgaaatttgaaatggttcaaattttggatgagaatggtaacgtcgtaaatgaagacttagtacctgatcttacggatgaacaattagtagaattaatggaaagaatggtatggactcgtatccttgatcaacgttctatctcattaaacagacaaggacgtttaggtttctatgcaccaactgctggtcaagaagcatcacaattagcgtcacaatacgctttagaaaaagaagattacattttaccaggatacagagatgttcctcaaattatttggcatggtttaccattaactgaagctttcttattctcaagaggtcacttcaaaggaaatcaattccctgaaggcgttaatgcattaagcccacaaattattatcggtgcacaatacattcaaactgctggcgttgcatttgcacttaaaaaacgtggtaaaaatgcagttgcaatcacttacactggtgacggtggttcttcacaaggtgatttctacgaaggtattaactttgcagcagcttataaagcacctgcaattttcgttattcaaaacaataactatgcaatttcaacaccaagaagcaagcaaactgctgctgaaacattagctcaaaaagcaattgctgtaggtattcctggtatccaagttgatggtatggatgcgttagctgtatatcaagcaactaaagaagcacgtgaccgcgcagttgcaggtgaaggcccaacattaattgaaactatgacatatcgttatggtcctcatacaatggctggtgacgatccaactcgttacagaacttcagatgaagatgctgaatgggagaaaaaagacccattagtacgtttccgtaaattccttgaaaacaaaggtttatggaatgaagacaaagaaaatgaagttattgaacgtgcaaaagctgatattaaagcagcaattaaagaggctgataacactgaaaaacaaactgttacttctctaatggaaattatgtatgaagatatgcctcaaaacttagcagaacaatatgaaatatacaaagagaaggagtcgaagtaagccatggcacaaatgacaatggttcaagcgattaatgatgcgcttaaaactgaacttaaaaatgaccaagatgttttaatttttggtgaagacgttggtgttaacggcggtgttttccgtgttactgaaggactacaaaaagaatttggtgaagatagagtattcgatacacctttagctgaatcaggtattggtggtttagcaatgggtcttgcagttgaaggattccgtccggttatggaagtacaattcttaggtttcgtattcgaagtatttgatgcgattgctggacaaattgcacgtactcgtttccgttcaggcggtactaaaactgcacctgtaacaattcgtagcccatttggtggtggcgtacacacacctgaattgcacgcagataacttagaaggtattttagctcaatctccaggtctaaaggttgttattccttcaggcccatacgatgcgaaaggtttattaatttcttctattagaagtaatgacccagtcgtatacttagagcatatgaaattgtatcgttcattccgtgaagaagtacctgaagaagaatatacaattgacattggtaaggctaatgtgaaaaaagaaggtaatgacatttcaatcatcacatacggtgcaatggttcaagaatcaatgaaagctgcagaagaacttgaaaaagatggttattctgttgaagtaattgacttacgtactgttcaaccaatcgatgttgatacaattgtagcttcagttgaaaaaactggtcgtgcagttgtagttcaagaagcacaacgtcaagctggtgttggtgcagcagttgtagctgaattaagtgaacgtgcaatcctttcattagaagcacctattggaagagttgcagcagcagatacaatttatccattcactcaagctgaaaatgtttggttaccaaacaaaaatgacatcatcgaaaaagcaaaagaaactttagaattttaatacattgtaaaagttaacgaagttagcgtattttagtctcattgattaaaatgaaatgtttaatttacgaaatcttaggagggcaaaaacgtggcatttgaatttagattacccgatatcggggaaggtatccacgaaggtgaaattgtaaaatggtttgttaaagctggagatactattgaagaagacgatgttttagctgaggtacaaaacgataaatcagtagtagaaatcccatcaccagtatctggtactgtagaagaagttatggtagaagaaggtacagtagctgtagttggtgacgttattgttaaaatcgatgcacctgatgcagaagatatgcaatttaaaggtcatgatgatgattcatcatctaaagaagaacctgcgaaagaggaagcgccagcagagcaagcacctgtagctactcaaactgaagaagtagatgaaaacagaactgtaaaagcaatgccttcagtacgtaaatacgcacgtgaaaaaggtgttaacattaaagcagtttctggatctggtaaaaatggtcgtattacaaaagaagatgtagatgcatacttaaatggtggtgcaccaacagcttcaaatgaatcagctgcttcagctacaaatgaagaagttgctgaaactcctgcagcacctgcagcagtatcattagaaggcgacttcccagaaacaactgaaaaaatccctgctatgcgtagagcaattgcgaaagcaatggttaactctaagcatactgcacctcatgtaacattaatggatgaaattgatgttcaagcattatgggatcaccgtaagaaatttaaagaaatcgcagctgaacaaggtactaagttaacattcttaccatatgttgttaaagcacttgtttctgcattgaaaaaatacccagcacttaatacttcattcaatgaagaagctggtgaaattgtgcataaacattactggaatatcggtattgcggcggacactgatagaggcttattagtacctgtagtgaaacatgctgaccgtaaatctattttccaaatttctgatgaaattaacgaattagctgttaaagcacgtgatggtaaattaacagccgatgaaatgaaaggtgcaacatgcacaatcagtaatatcggttcagctggtggacaatggttcactccagttatcaatcacccagaagtagcaatcttaggaattggccgtattgctcaaaaacctatcgttaaagatggagaaattgttgcagcaccagtattagcattatcattaagctttgaccacagacaaattgatggtgcaactggccaaaatgcaatgaatcacattaaacgcttattaaataatccagaattattattaatggaggggtaaaacatggtagttggagatttcccaattgaaacagatactatagtaatcggagcaggtcctggtggatacgttgcagcaattcgtgcagctcaattaggacaaaaagtaacaatcgttgagaaaggtaatcttggtggtgtttgcttaaacgtaggatgtattccttcaaaagcattactacatgcttctcaccgttttgttgaagcacaacattctgaaaacttaggtgttattgctgaaagtgtttctttaaacttccaaaaagttcaagaattcaaatcatcagttgttaataaattaactggtggtgttgaaggcttacttaaaggtaacaaagtaaacatcgttaaaggtgaagcatatttcgtagataacaatagcttacgtgttatggacgaaaagagcgcacaaacatacaactttaaaaacgcaatcattgcaacaggttcaagaccaattgaaattcctaatttcaaattcggtaaacgtgttatcgactcaacaggtgctttaaatttacaagaagtaccaggtaaattagttgtagttggtggaggatacattggatcagaattaggtacagcatttgctaactttggttcagaagtaaccatccttgaaggtgctaaagatatcttaggtggcttcgaaaaacaaatgacacaacctgttaaaaaaggtatgaaagaaaaaggtgttgaaatcgttactgaagcaatggctaaatcagctgaagaaacagataacggagttaaagttacttatgaagctaaaggcgaagagaaaacaatcgaagctgattatgtattagtaactgtaggtcgtcgtccaaacacagacgaattaggcctagaagaattaggtgttaaattcgctgaccgtggattattagaagttgataaacaaagccgtacgtctatcagcaatatctatgcaattggtgatatcgttccaggtttaccacttgctcacaaagctagctatgaagctaaagttgctgctgaagcaattgatggtcaagctgctgaagttgattacattggtatgccagcagtatgctttactgaacctgaattagctacagttggttattcagaagcgcaagctaaagaagaaggtttagcaattaaagcttctaaatttccatatgcagcaaatggtcgtgcattatcattagacgatactaacggatttgttaaacttattacacttaaagaagatgatactttaatcggtgctcaagtagttggtactggtgcatcagatattatctctgaattaggtttagcaattgaagctggtatgaatgctgaagatatcgcattaacaatccatgcacatccaacattaggtgagatgactatggaagcagctgaaaaagctatcggatacccaatccatacaatgtaataactgattatctataaagattcagtttttaaaagctgtagcatatgctacggcttttttgttttaggtaataaagtagtgtaaggaaattgatttgagatatcgttaacatgtgacatgcatgttatactagcgatgctaacaaaagaattgaaatggagggttcaacaatggaatatgagtatccaattgatttagactggagtaatgaagagatgattttagtgataaatttctttaatcatgtagagaagtattatgaatccggcgtgacggcaggagactttatggatgcatataaaagatttaaagaaattgtgcctgctaaagcagaggaaaaacaaatttttaatactttcgaaaaaagtagtggctataatagttacaaagcagttcaagatgtaaaaactcactctgaagaacaaagagtaacagctaaaaaataattcgttcgaaattaacacaatttaataggattttttctttaaaactattgctaataaagctatattttgatacctttatcaagtgttaaacaaaatgtttgataaaagtaaacttaatatagcttttttaggtggaaagataaatgaacataggtaataaaattaaaaatcttagaagaattaaaaatttaacgcaagaagaacttgctgaacgtactgacttatcgaaaggctacatttcacaaatagaaagtgaacatgcctcaccaagtatggaaactttcttaaatattatagaggtgttagggacgacgccaagtgaattttttaaagacagtgaaaatgaaaaagtattatacaagaaggaagaacaagttatttatgatgagtatgatgaaggttatatattaaattggttagtttcaaagtcaaatgaatatgatatggagccattaatattaactttaaagcctggcgcatcatataaaaattttaatccatcagagtctgatacgtttatttattgtatgtcaggtcagataacacttaatttaggcaaagaggtatatcaagcacaagaagaagacgttttgtattttaaagcacgagataatcatcgtttgtcaaatgaatcaaacaatgaaacacgaatacttattgtagcgacagcttcatatttataggggggatcttatttggaaccgttattatcattaaaatcagttagtaaaagctatgatgatcttaatatcttagatgacatagatattgatattgaatcaggatacttttatacattattaggtccttcaggttgtggtaaaacaacaattttaaaattaattgcagggtttgaatatcctgacagtggtgaagtgatttatcaaaacaaaccaattggtaatttaccaccaaataaacgtaaagtgaatacagtctttcaagattatgcattatttccacacttaaacgtctatgataatatcgctttcggtttgaaattaaaaaaattatcaaaaaccgaaattgatcaaaaagtaactgaggcattaaaattagttaagctttcaggttatgaaaaaaggaatattaatgaaatgagtggcggacaaaagcaacgtgttgcaattgcacgtgctattgtaaatgaaccagaaatattattgttagatgaatctttatccgcattagatttgaaattgcgtactgaaatgcaatatgaattacgagaattgcaatctagattaggtattacatttatatttgtaacacatgatcaagaagaagctttagcactaagtgactttctttttgtattaaaagatgggaaaattcaacaatttggtacaccaacagatatatatgacgaaccagtgaatcgatttgtagctgattttattggagaatctaatattgttgaagggcgcatggttagagattatgtcgtgaatatttatgggcaagatttcgaatgtgtcgatatgggtattcctgaaaataaaaaagtagaagtcgttattcgaccagaagatatatcattaatcaaagctgaagaaggattatttaaagcaactgttgattctatgttgtttagaggggtccactatgaaatatgttgtatagacaataaaggttatgaatgggtaatacaaacgactaaaaaagccgaagtaggcagcgaagttggtctttattttgatcctgaagccattcatattatggttcctggtgaaacagaagaagagtttgataaacgtattgaaagctatgaggaagtagacaatgcgtaatactaataaatttcttttaatcccgtatttactatggatggttatatttattattgtaccagttgtattactcatttatttttcatttttagatatcaatggacattttagtttcacgaattatcaacaaatttttactacaaaatatttaaaaatgtttgcatattcaattttatatgccgccttaataacaattattacgttggctatcagttatccagctgcctattatattactcgctcgaaatttcaaaatatcttattaatgataatgattattccaacatggataaatttattgttgaagacatatgcttttataggtttattaagtcacgatggtgtgattaatcaatttttccacttatttaatttaccatcattcaatttgttatttacaactggtgcctttttagtagtggcaagttatatttatataccatttatgattttacctatatttaatagcatgaaagcaattcctaataatttattgcaagcctcaagtgatttaggtgctagtccattctatacttttagaaaagtaatcatgccgttaacaaaagaaggtgttatgactgggattcaagtaacctttattccatcactttcattatttatgattacaagattaattgcaggtaataaagtcataaatataggtacggcaatagaggagcaatttttaacaattcaaaattatggtatgggatcaactatagctatattcttaattgtatttatggcattcattttaatcattacaaaatcatctaatgggagagggtgaatcatatgaaatggtatggaaagctgtatatcgggatacttttagcgattttatacatcccaatattctttttaatgttctattcattcaattcggctggtaatatgattcactttgaacattttacattagagcattatcaatcattatttcaaaatgatcatttaatgtcggtcatttttaacacgatagctgtagcacttttagcagcctcaatttctacagttattggtacatttggtgccattgctatttattatttaagaaataaaaagtttaaagtaactttactaacattgaataatgtcttgatggtatcatccgacgttgtcataggtgcatcattcttaattatgtttacaacgattggccattttactggtcttggtttaggattttggacagttctaatatctcatattgcattttgcatacctatagttgtgattatcgtcttaccacaactgtatgaaatgaataataatatgttaaatgctgcaagagatttaggagcgactgaaccacaattattaagcaacattattattcctaatattttaccttctattataggaggattctttatggctttaacttattcactagacgatttcacagtaagtttcttcgttactggtaatggctttagtgtgttatcagttgaagtttatgctatggcgagaaaaggaattagtatggaaattaatgcgatttcaacattattgtttgctgttattgtattaggaatactaggatattatttgattcaatacgtgataaataagaaaaaactaatcaagcgaggtgtaaaataatgaaacgttttttacaactcattataggtgcattagttgtgggtatgctttgtcttactttaagtcattggtttaaatctaaagaacaagtgcatacaaatcaaaaaatttacgtatacaattggggcgaatatattgatccagagttaattaagaaatttgaaaaagaaactggcattcaagtcgtttatgaaactttcgattcaaatgaagcgatggaagccaaaattcgcaatggtggtacacattatgatgttgcttttcctagtgaatatacagttcaaaaattgaaaagagatcatttattgttaccaatagatcataataaagtacctaatattaaaaatttagattcagattatatgaatatgtcatttgataaaggcaataaatattctttaccttatttctttggaactgtaggtattttatataataaagaaaagtatccaaatgaatcatttgatagttggaagtcattgtataatcctaaatttaaaaaccaaattttactagttgacggtgctagagagattataggcatgagtttgaataaacttgggtataatcttaatgaccgtaattcgcaccatttaaaagaagcagagcgagatttaactaaattagcaccacaagtaagaggtgtcgtaggtgatgaaattaccatgatgcttgaacaaaatgaaggtaacattgcggttgtttggagtggtgttgcagcacctctagtgcaagaaggggataaatataactatgttattcctaaagaaggatcgaatttatggttcgacaatatggtaattccaaaaacggcacaaaataaagagggtgcatataaatttatgaattttttattagatgctaaaaataacaagcaaaatactgaattcgtaggctatgcaacgccaaacaaggctgctcgacaattgttgcctaaagagattaaagacgaccatcgtttctatccgactaagaaagagcaagaacgccttgaagtttataaagatttaggacctgaagttttaagtgaatacaatgaaaactttttgaatttcaaaatgtcattaaaataaaatcataaatagtagttatttactgtatatttagttataataacgggataagtactataaggagttgtaacgaatgactggagaacaatttactcaaattaaacgtccagtaagtagattaactgaaaaagttctaggttggttatgttgggtgatgttattagtgcttactgtcattacgatgtttatagcacttgtttcattcagtaataacacatcgattgctaatcttgaaaatacattaaacaataatgcatttatccagcaattattagctggaaatggctataatacaacacaatttgtaatatggttacaaaatggtatatgggctattatcgtttactttattgtttgtttgttgatttcatttttagctctcatatctatgaatataagaatcttgtcaggtttcttattcttaatatcagcaattgtaacgattcctttagttttacttatcgttactttaatcattccgatattattctttattattgcgatgatgctatttataagaaaagataaagttgaaatggttgcgccacaatattatgaagagtacaatggaccgatttatgattatcgtgaacctgtgtatgagcgcccacaaccgaaagatgattattatgatgtgcctaaatatgaaaaagaattggataaatcaaacactgtatatgatcaagaactggaaagagataaatatgatcaatttcctaaacgtgcagttgaaagtgaatataatcatgatgagcgcactgaggaagaaccatcagtattatccagacaggctaaatacaaacaaaaaagtactgaagaactaggtattgaagatgatggttattatgcagaacctgaagttgatccaaaagaattgaaagcacaacaaaagcgagaaaaagctgaaattaaagctaagaaaaaagaaaaacgtaaagcttataaccaacgaatgaaagaacgtaggaaaaatcaacctagcgcagttagtcaacgtcgaatgaattttgaagagcgacgtcaaatttacaacaatgatatttctgaagaacgcaattcaagtgaagttaaggacaaaaaagagcaagaataaatattgatgatacccagattagtaagtagaggtcttttgcttattaatctgggtttttatatgaggttaattatcgataacgtttaattaaagtgtttaggtgtcataattttaaatgacgatttctctttaccatacagctaaattaccatcaatctgaattcagatgtttattataaaaattagatgaaaaaaatgttaatatacaagtaaattaatgtgcttatatctataggctcgtagtatacttattaaaatattaaacaaagaaaggattttaagatgaatagaaaacctgaattaatcatggcttggattgcaaatagtattagtattatttatttattagttatggggctatcctatttttctttaaaaagtggtaatgcatcacaacgtgaagaattagcgaagcaattatctcagaacggtggcaaggtttctttagatatgcttcagacaacaatgggtgcattagcaattattttattaatttcaacactttatggtatatttgcgacaatttgtattaaaggacgtagaaaattatcgattatactttttgttatcgcgataattgtaagtttgatggctcttaatttaattgcaattgtcttatggattatcgtgatgattatgttgatttctaaaaaagaatcaaaagaaactacccataaggacgatgagtatatttatcattaatatgttcatagcaaaagaaaaaccattaaaatgttaagttgttaattattagatacaaccaacattttaatggttttatttttaaccttgtagttcttggaatgtttgaacgattaaatagacatttaaaatacttagaataataataagtgtccatgaaatgatattaacccatgttttattatagaaaggtcccatcaagtctttattactagtagctaattgtaatggtattaaacagaatggcagagcaatacttaaaaatacttgagagaatacaagtagttgctcaattttagctgcattacctttaaaaatgattaaacatacgataacaggaatgacagcaagggaacgtgtaattaaacgtcttaaccaatttggtatgtgtaatcttaaaaatccttccattacaatttgtcctgctaaagtaccagtaatcgttgaattttgacctgacgctaataatgcaactgcaaataatgtactcatgattgcacccattgttgcacctagtacaggttcagtttttaaggcgtgatataaatcatagaaaccacctaaatcgtcagcgtttgagttgaaaaatagtgatgctcctaacactaataataagcaattgactacaaatgcgattgataactgaatgttcgaatctatcgtagcaaatttaatcgcttgcgccttttcttcattgttatgtcttgagtatgttctagattgtacaattgatgaatgtaagtacaaattatgaggcataattgttgctccaataatacctaatgcaatatagagaatgccgttatttgtaatgatttcactatgtggaataaatccatttaacacagcgttcaactgtggtgatgaaatatagacttcaaatataaagatgaataacactgtgaaaattaatgtaccaacaatagcttcaatttttctaaaaccatatttcattataaatagtagtaaaaatacatcaagtacagtaattagtgcaccgacaattaaaggtatgttaaataggagattgagagcaatagcactaccaataacctcagcaatatctgtggcgataattgctagttctgcaataatccaaaagattatagcaataggtcttgataaataatgtcgtgtcatttgagctaagtccatacctgttgctattcctaatctcactgtcatgctttgaagtaacattgctgataaacttgaaataagaattacgaatagcaaagtatagccatattgcgcgccaccttgcattgatgttatccagtttccgggatccatgtaaccaacagcgactaataacccaggcccaagaaatgataaaaatttctgtttatttgaactgcgatgatcgaatttaattgtattgtttatttcgtctaaacttaattgttcatttgttgaatgtcgtttattattcattttgactcacctctacttcttatggacaatataataacctaataaaacgtttaggtcaacctaaatttattttaatttttttaaaagtatgaattattatgttgaacgttcaatttaatggtaagtaaaaagagcacgaaatcatggatgtgattacgtgctctattatttaaacaaagttatttatgcagaataaaatggtaagaactgatcgaaggtttcttctaaaaatgcaataaatgctttgtcactttttaatcttttatcttgtggtgtgattgcacgcgctataaagaattcaccttttttcacattgatggctctttgtatcgcttcttttaaatcatcatccgttaaatctttaataaatggtttatcaggtttcatatgatctaagcatacacgataatcatcaggtaattgttgaatagctttaaattttctttcaaaaacttttgcacgtgttgctttatcttttgcttcatgcatgattccaaacataacaaacagttgatcttcaaacataccaatttggaaatgaggtaacattttatagcctcgtttacttgtagcaaaagcaacccatgtatctttaggaggattcacacttcttctagcatgctttgctacgtgaggataaaatgtttcaccagtttgacttgtaaagaagtcactaaaatattctcctaattcatggagttgtggtcgtatgtattcgtttaaagcttccattcgtgcgtctaagccttctacgttgaatgttttgaaatctttaggtttaaatgtatattttgtcatagagtacctcctgtatagtgtttaaaaatattgtagcatatgttttatcaattgcggattaagacgctctcattaaaattagtattttcatttttatcataagaagttatttttataaaatgttgatgtataataaagatgttaggagatgatgttatggcactttatggatttgcccaaggacttattcaagaagcaggaattagaattaaacaattgatggagcaaaatttaacaattgaaacaaagtcaaatccgaatgaccttgttacaaatgtagataaagcaacagaagattttatttttgatacaattttagaaacatatcccaatcatcaagtattaggtgaagaagggcatggtcatgacatcgatacttccaaaggtacggtatgggttgttgacccaatagacggtacattgaattttgttcatcaacaagaaaatttcgcgatttcaattggtatttatatcgatggtaaaccttatgcaggttttgtatatgatgttatggctgatgtcttatatcatgctaaagtaggggaaggtgcatatcgaggtagccaacccttgaaaccattgaatgattctaatctaagacaaagcattattgggatcaatccgaactggttgactaaacctgtgctaggagagatttttaaggatgtcgtaaatatttcaagaagtgcaagggcatatggtagtgcagcgcttgaaattgtttctgtcgctaccggtaatttagaagcatatatgacacctagactccaaccgtgggattttgctggaggactagtcattttaaatgaggtggacggtctagcttctaatttactaggagaaccattaacaattagtggtccaaattcaatcttagttggtaatcgtggtgttcatagagagatcctcggtgtatatttagagccacatcgcgatgcgttaatacaattacatgaacaacgatttaaaagaaaatcaaaataattaccaaaagcgtaatatgtagtcctaacaattaggtgacatattacgtttttatatcttaaataataaaaacacgcgccaatataaaaccatttaaatgttcatcatgaacatgtgtggtctttaatcaacgcgtgttattgtcgatataacttatagccaatcgttttctcgatattttttctttgtagtaaatccaattccaaaggttgcaacgagtaatataaatgttaaaatcatcattggtacatttgatgcaccaacagcaaaactaaataatactaagaaaataacagctaatatagaaaatacccaaaagatatttttagattttttttgtttcatcctatccccaccttttgcttatcttttctcaattatatgatataataaaaaagttgtaattaaaagtgggattttacttaagaaagaaggaaactatttatatgactaataaaagagaagatgtccgcaatatagcaattattgctcacgttgaccatggtaaaacaactttagtagatgagttgttaaaacaatctggtatattcagagaaaatgaacatgtcgatgaacgtgcaatggactctaacgatatcgaaagagagcgtggaattacgattctagccaaaaatacggctgttgattataaaggtacacttattaatattttggatacaccaggacatgctgactttggtggagaagtagaacgtattatgaaaatggttgatggggttgtcttagtagtagatgcgtatgaaggtacaatgcctcaaacacgttttgtacttaaaaaagcgctagaacaaaacctaaaacctgttgttgttgttaataaaattgataaaccatcagcacgtccagagggtgttgtagatgaagttttagatttatttattgaattagaagcaaacgatgaacaattagaattccctgttgtttatgcttcagcagtaaatggtacagctagcttagatcctgaaaaacaagatgataatttacaatcattatatgaaacaattattgattatgtaccagctccaattgataacagtgatgagccattacaattccaagtagcattgttggactacaatgattatgttggtcgtattggtattggtcgtgtattcagaggtaaaatgcgtgtcggagataatgtatcactaattaaattagacggtacagtgaaaaacttccgtgtaactaaaatctttggttactttggattaaaacgtttagaaattgaagaagcacaagctggagatttaattgctgtttcaggtatggaagacattaatgttggtgaaactgtaacaccacatgaccatcaagaagcattgccagttctacgtattgatgagcctactcttgaaatgacatttaaagttaacaattcaccatttgctggccgtgaaggtgactttgtaacagcgcgtcaaattcaagaacgtttaaatcaacaattagaaacagatgtatctttgaaagtttctaacacagattctccagatacatgggtagttgctggtcgaggtgaattgcatttatcaatccttattgaaaatatgcgtcgtgaaggttatgaattacaagtttcaaaaccacaagtaattattaaagaaattgatggtgtaatgtgtgaaccatttgaacgtgtgcaatgtgaagtgccacaagaaaatgcaggtgcggttattgaatcattaggtgcacgtaaaggtgaaatggttgatatgactacaactgataatggacttacacgtttaatctttaatgtaccggctcgtggtatgattggttatacgactgaatttatgtcaatgacaagaggttacggtattattaaccatacatttgaagaatttagaccacgtattaaagcgcaaattggcggtcgtcgtaatggtgcgttaatttcaatggatcaaggttctgcaagtacttatgccattttaggacttgaagatagaggtgtaaacttcatggaacctggtactgaagtttatgaaggtatgattgttggtgaacataatcgtgaaaatgatttaactgttaatatcactaaaacaaaacatcaaactaacgtacgttctgcaacgaaagaccaaacacaaacaatgaatagaccgcgtatactaacattggaagaagcgttacaattcattaatgatgatgaacttgttgaggttactccagaaagcatacgtttaagaaagaaaattttaaacaaaaatgttcgtgaaaaagaagcaaagcgtatcaaacaaatgatgcaagaaaatgaataattaacataataaaagagaagctgagcgatgaaagttgcttagcttctcttttggcatataatatttgaaaaagtgttttaatgctatcagttcctgttactttcacattttcaaatttctaacttgttaattcagatattaatcgagcggatagtgttgcgcacgttgtttaggggtgtctagtcgacttttacaatcatcgcacataaatgttcgaataggattgtttttaagtcgtttagactcagttgtgcgctcatctataaatacttttgcatcacagataatgcattgcacttgtctcaaattaaatcacctcaatatgagttacatggttgattcgatatgaataaccatcttcttgattgtaaataaaactatctacaccattatcgctgtaaagtcgtttaccgtcttttgcaaattggaaaaataaatagggcaatagatctatcggtatatctaaatgatcatgctcatttgataatcgaatagtagttgcagagtcatgtggttcggaatgtttgaaaaatggtgtcatattaatgacaaatgaaccttctaacatggcacgttttttatattttatttctgaatttaaagtaggcggattagtttgtccttctaggatagcacgattccattcatgattatcttcaaagtcgattggttttgaaccatcaaatacacctttttctaaatcttcgatgctaacttttctatcatcgaaaatccaagtcgtactatctaatgttataggaaactttacagctcctttaatttgtatcattttcccactccctatcaatgtatatagcattattttaacacaaattgctaacgacacattttaaatctacttgctttttaatatttagtaagataaacttttagtaagacttgagaatttatatagagggggagcgtgtcatggcgaaacaaacaacaatgaaaaatgcagctttgaaacaattgactaaagatgctgatgaaatcttgcatctgattaaagttcaactagataatttaacattaccttcatgcccattatatgaagaagtactagatacacaaatgtttggacttcaaaaagaagttgattttgctgttaaattaggtttagttgaccgcgaagatggcaaacaaattatgttacgtcttgagaaagaactttcaaaattacatgaagcttttacacttgtttaaggtttaatatataagcatattaaaacagcgtgagatatcgacaattgagcagcgccgattttatatttataatttaattattgattaaagtggctgttatgttgtcttcttgatgacatgtcagtcacttttattgggttttagcaattcacgatattaagtaaacaaatattctataaattacctcaagagacctgttaatatttgtgattatgactgtgtcatgtatataataagtaacatggatttttaaaattaaagtataaaacgaaatcatttgaagtataaattgtagaattggatgactgaatatatgaagaattttagaagtattttacggtatattggtaaaacctcaaagtttattgattacccgttattagttacatatattgtattgagtttaattggattagtgatggtatatagtgccagtatggttccagcaactaaaggtacattgactggtggtatcgatgttccaggaacgtatttttacaaccgacaattagcatatgtcataatgagttttataattgtattttttattgcatttttaatgaatgttaaattactgagtaatattaaagtgcaaaaaggtatgattataactatcgtctcgctattattactgacgttagtaatcggtaaagatattaatggttctaaaagttggataaacttaggatttatgaacttacaggcatctgagttattaaaaattgcaatcatattatatatcccatttatgattagtaaaaaaatgcctagagtattaagtaaaccaaaattaattttaagtcctattgtattagcattaggttgtacgtttttagttttcttacaaaaagacgtagggcaaacattactaatattaattattttagttgcgattattttttattcaggaattggggtaaacaaagtcctaagatttggaataccagcagtactaggattcttagtagtatttgtcattgcattaatggctggttggttaccaagttatttaactgccagatttagtacgctaacagatccattccaattcgaatcaggaactggataccatatttccaattcattgcttgcgataggtaacggtggcgtatttggaaaaggattaggaaatagtgcaatgaaattgggctatttaccagaaccacatacagattttatttttgcaattatttgcgaagaattaggtttaatcggaggattgctagttattactttagagttctttattgtatatcgtgccttccagtttgcaaataaaacatcatcatatttttataaacttgtgtgtgttgggattgccacatactttggaagccaaacgtttgtaaacattggtggtatttcggcaacaattccattaactggtgtgccattgccatttatcagctttggtggatcatcaatgattagtttaagtattgctatgggattacttctggttgtaggtaaacaaatcaaagtagaccagcaacgaaagaaacaacaacaaaaagttgatataagaagacaatttaattaaaaaatactagccaatatttagcgcgagatgacttctgtcattaagcaatgctacacattggctatttatatactctttgtcaaattggactgatgagttcaataacggaagttaagcaaccaaacaacgcttaacttcctttttgttttgatattacgagattactcatgattatcaaattttataaacaaaacaacgtataattataactaaattttatgactaaaaatcactaaatgtggtggcgaaattagaatcatgatgataagataaagttatcgctattgataataaatgttgatgttttacaattttatttttaattttttagagttgtagaaatcgaaaatgtatcacaacaaaaacgtgaactacctgttgttgcataatcctttttgaaattattatttttgaagcggaggttttaattgtctcaagaatgttaaattttgaaaatttgaaacataactatagcaaaacagagcgctttaagataaaattttattatctaattagttagaaaattctaatagtttgaggagtgtatcgctattgaaacaaataaaaaagttacttgttgctaaccgtggagaaattgcaattcgtatattcagagcggcagcagaattagacatcagcacagttgcaatttattcgaatgaagacaaaagttcattacatagatataaagcagatgaatcctatttagttggaagtgatttaggtcctgctgaaagttatttaaatattgagcgtatcattgatgtagcaaaacaagcgaatgtggatgcgattcatcctggctatggatttttaagtgaaaatgaacaatttgcgcgtcgttgtgcagaagaagggattaaatttattggtcctcatttagaacatttagatatgtttggagataaagttaaagctcgtacaacggctatcaaggcagatttaccagttattcctggtacagacggtccaattaaatcatatgaattagcaaaagaatttgcagaagaagctggtttcccgctaatgattaaagccacaagtggtggcggcggtaaaggtatgagaatcgttcgtgaagaaagtgaattagaagatgctttccatagagcaaaatcagaagcagaaaaatcatttggtaatagtgaagtttacatagaaagatacattgataatccaaagcatattgaagtacaagtcataggtgacgaacatggaaatatcgtacacttatttgaacgtgattgttcagtacaacgtcgtcatcaaaaagttgtagaagttgcaccatcagttggattatcatcaacattacgtcaacgtatttgtgatgctgcaattcaattgatggaaaatattaaatatgtcaatgcaggtactgttgaatttctagtatctggtgacgaattcttctttatagaagttaaccctcgtgtacaagtagagcatacaattacagagatggtaacaggaattgatattgttaagacacaaattttagttgcagcaggtgccgatttatttggtgaagagattaatatgccgcaacaaaaagatattacaacattaggctatgccatccaatgtcgtattacaacagaagatccgttaaatgattttatgccggatactggaacaatcattgcttatcgttcaagcggtggctttggtgtacgtcttgatgctggagatggtttccaaggtgctgagatatcaccttattatgattcattactcgtaaaattatctacacatgcgatatcatttaaacaagcagaagaaaaaatggtacgttcattacgagaaatgcgtattcgtggtgttaaaactaatattccattcttaattaatgtaatgaagaataaaaagttcacaagtggtgattacacaactaaatttattgaagaaacaccagaacttttcgacattcagccgtctctagatagaggtactaaaacattagaatatataggtaatgtaacaattaatggtttcccaaatgttgagaaacgtccgaaaccagactatgaattagcatcaattccaactgtatcttcaagtaaaatcgcttcatttagtggtacgaaacaattgcttgatgaagtaggtccaaaaggtgtagctgaatgggttaaaaagcaggatgatgtcttactaacagatacaacctttagagatgcacaccaatcattattagctacacgagttagaactaaggatatgattaatatcgcatccaaaacagcggacgtatttaaagatggtttctcactagaaatgtggggcggtgctacatttgatgtggcatataatttcttgaaggaaaacccatgggaacgacttgaacgtctacgtaaagctattccaaatgtattattccaaatgttgttacgtgcttcaaacgcagttggttataaaaactatcctgataatgttattcataaattcgtacaagaaagtgctaaagcaggcatagatgtctttagaattttcgattcattaaactgggtagatcaaatgaaagttgccaatgaagcagtacaagaagcgggcaaaatctcagaaggtactatttgttatacaggtgacattttaaatcctgagcgatcaaacatttatactttagagtattatgtcaaactagctaaagagttagaacgtgaaggtttccatattttagcgattaaagatatggcaggcttattaaaacctaaagctgcttacgaattgattggtgagttaaaagcagctgtagatttaccaatccatcttcacactcatgatacaagtggtaatggtttattaacgtacaaacaagcaatagatgctggtgtcgatatcattgatactgctgttgcttcaatgagtggtttaacaagtcagccaagcgccaattcgttatattatgcattaaatggcttcccacgtcaccttagaactgatattgaaggtatggagtcacttagtcattattggtcaactgtacgtacttattattcagactttgaaagtgatatcaaatcaccgaatactgaaatttatcaacatgaaatgcctggtggacagtattcgaatttaagtcaacaagctaaaagtttaggtttaggcgaaagatttgatgaagtcaaagatatgtatcgcagagtgaatttcttatttggtgatatcgtaaaagtaacgccatcgtctaaagtagttggtgatatggcactttatatggtacaaaatgatcttgatgaacaatccgttattacagatggctataaattagatttcccagaatcagtagtgtcgttcttcaaaggtgaaataggacaacctgtaaatggttttaataaagatttacaagcggttattttaaaaggccaagaagcattaacagctcgtccaggtgaatatctagagccagttgattttgaaaaagtccgtgagttgcttgaagaagagcaacaaggtcctgttacggagcaagatattattagttatgtattatatccaaaagtatatgaacaatatattcaaactagaaatcaatacggaaacttatcgttacttgatacgcctacattcttctttggaatgcgtaatggtgaaacagtagaaatcgaaatcgataaaggtaaacgattaattattaaactagaaacgattagtgaaccagatgaaaatggtaatagaacgatttactatgcgatgaatggtcaagcgagacgtatttatattaaagatgaaaatgtgcatacaaatgcgaacgttaagccaaaagcagataagagtaatccaagtcatatcggtgcgcaaatgccaggttcagtaactgaagtcaaggttagtgtaggtgaaactgtgaaagctaatcagccgttgctaattactgaagctatgaaaatggaaacaacaattcaagcaccatttgacggtgtgattaaacaagtaactgtaaataatggtgacacaatagcgacaggcgatttattaatcgaaattgaaaaagcaactgactaaaatgattaaaataaaacgagattacacaacaattgacgtgtaatctcgtttttacttgtcttaggtttaattttaaatattgatataaaaagggagtgggacagaaatgatattttcgcaaaatttatttcgtcgtcccaccccggcaaggttgactagaattgaaaaaagcttgttacaagcgcattttcgttcagtcaactactgccaatataactttgtagagcattgaacattgatttatgtcacagcttctttgcttttttgttattgcttgtcacttcttactgatcgtaacattagcatgataaagtatgttgtcataccaaataaataagtgataaataatgcatggaatagtgcgattatcaaattaacattagtcataatagacaatgcacctgtgataacttgtaatataacaagtataaatgcagctgtataaccataatgaacagtacggttatttggataatttttaacagcgtgaatataagtaatcataataatcgtaaacactataaaagccatgatacgatgcgtgagttggacccaatcttgttctgaatgtggtacaagatcgtggaatggcaatggccaaccaccatatgctaaacttgcatccgcatgtcgcactagtgcaccagtgtaaacaccacaataaatgatgattgccattaaccatgttaaacgtcttaatggctttttgatatataattcgtcagcttcatatttttgatctatagagaaaataatcaatgttattaaaaatacagatgagaaactgattaatgatataccaaagtgcaatgctaaaacgtaatcgttttgttgccaaataacagcagcagctccgattaatgcttgcaataataagaatccaacactaatgattgataaaggtttaatttctttaatatagcctatatgtttccatgcagtgataactaaccataagaccattaataaagacaaagctgaaacggctctatgacttaattcaataatcgtatcaataggaaagaattctggaatcaacgcaccatgacatagtggccaagaagaaccacaaccatcagctgatccggttttggtaactaaggctccaccaagttgtacaaatgtcatcattaacgttgctacgacacctaaccattttaaattctttttgccaaacaatttatacaccccatcataaaaaaacgcatcactgagattttgatttaatagctgaacttgagttaatactatgaatgaacctaacagttggatttgaagagatgggatccaacacagtttatataatttaattgtttctagtattagaagtgatcgactatcatcaatgatatgaataacacgacaatgatgtgccgttcactgctataaaatttcagtcacagttactcaaatttgaagcttaaatattaatctcttttagatgcatgattctacttattaaaattttctaacatatacattatagcaataaattaaatgttatttgtgtcacaaaattgacattttctcttgtcgttaatttgtcacaatttaattttattaaacctagtctttttatgcaatctaagatatcataatcttatatgaacaaatttaaggagggggattatgagcaaagagcatactttgtcacaaaatattagcagagttaacttcaaagaattgcaacagataattaaaatgggacttgttcaaggtaacttaattccggcttttgcgggcgcatggctagcagttgtaatgacaaatcattccttcttatcatcaatacctcaaattttattaatgctattaggatctactttaattatgggtggcgcatgtgcgttaaataattattacgaccaagatattgatcgtattatgcctagtaaacaaaatagaccaactgtaaataatagaattacagatcaaaatttattacttttaagttttggtatgatgttagttggagaaatttgtttgtttttattgaatataccatcaggcgtacttggtcttatggggattgtaggttatgtgtcttattactcaatatggtctaaaagacatacaacatggaacacagtgattgggagttttcctggagcagtaccaccactaattggatgggttgcaattgaaggacaaattagtttaacagcgattgcgctgtttttagttgtattttgttggcaaccaattcatttttatgccttagctattaaacgtaaagatgaatatgcacttgcaaatattccaatgttaccatcagttaagggctttaaacgtacacgtgtcagtatgtttatctggttgattattttattgccagtgcctttattactaataaatttaggtgtcgtattcgtagtgttagctacattattaaatttaggatggattgcattaggtttaacaacatttaagaaaaattcagatcaaacaaaatgggcaacacaaatgtttatatattcactaaattatttagtgatctttttcgtgttagctgtgattgtttcattacttactttgatctagattaattaagttaggatgaaaaatatgggcgttccaattttaccaacgataagtacgacatgtattgtcattagtgcaattttaattgccattggttggagacttatttggaaaagggaaatagataaacacaaaaatgttatgttagctgcagctgtttttgctttaacttttttcttaatctatgcaagtagaacgatttttatcggtaatacagcatttggcggaccagcatcaattaagaaatattatacaattttcttatttttccacattaatttagcaacaattggtggtattctaggtctagttcaaattattactgcatttaaagataaatataatgtgcaccgcaaattcgggccattcgcttcagttatatggttctgtactgcaattacaggtgtagcagtttacttattattatatgtattatatccaggtggagaaacgacatcactgattaaagcaacatttggtcattaatacgcttttacaaatgatactaatctgataaggcaatttgttttatcaggttttttgatgaagaatagtcggacagttgatggtattcatttgataccttaactgtccgtttttttatacatattttaatcctaataatgaaattcaacctgaaaacataaagataggttatgatatagactgtagggaaaatctttatgatgttaacattgtgcctgaagatggttttgtttcatcgaaatgacacagttatgtcagtgttgaaaatttgctaattaatgtgttgttttttacaatagtattaatactttttaggtggttgattgatgaaaaagttaattataagagtcgtcggagtattatttttagttggatttttaatatatcttttttattcaccgagattaaaatttgatgtattagagaacccgaataaaggtaataaagtaaatagatctgaacaggtgaataaatcaaataaccatgctgaaaatccaaagcctaaagaaggtgttggtacatgggtaggtaaagacattaaagtgcttacttctaaatttggacaagcagatcgtgtctacccttttagagatggttacaaaaattatgtgtttaaagacaaaaacagttattacattgtttcaactaaacgtgaagaaatcgtttcagtgtatgctacaggtgagaatgtcaatgttagtccgttaaaaataggacaacattctgcagaaatttttaatcatacaagtattaatccagaaccgtcctttacagttgatggtaaaaaatatgaatttgaactttcagatgaagatttaaaaacacaaacattgattaaatatggcaacatatatgcacaagtgtattctgatcaacaatcgaaaaaggtgctaagtgtacgatttttaacaaaagaaatgttagcagatattgaaccttatcgattaaattctaattctacgtcagaagagcataataagcgtccagttgagcaaaatccaaatcaattaatttctctttatgaagtaacgaatgaaatgagaaaattaaaaggattaaaaccattgaaaatcaatagcgatttagcacatattgcatctaataacttatatgaagcgacctctaatggttctgatagtgttgaatttacagaggacgcattaagagggcaattagataaaaatcatgttacttataaaacaactgctcaaaatgttggttatgcgtttaatgatgtaccaacattaatccatagttggatgaattcagatatacatcgatctcgtctattaaattcaaaatacgatgagatgggtggagatgtaatgagagattattattcactaattttcttagaaaaataacaatgaggggtatttatgattaatgaagcttcactagcgatattagatgatattgatgaactggctgatatgatagttgcatcagatatttatgcatcatttgagcaagctaaacaggcgctcgaaaacaatgacgaagcccatttactttatcaatcatttttaaaatcaaaagagaaatatgatgaagtaatgcgtttcgggaaatatcatcctgattataagaaagtcatgttagagacaagacaacgcaaaagagcatatgagatgcttgacgttgtgatgcattacaaagctagggaaatggcacttcaacatttaattgatgaagttgttacgaaaattgcgtacgctgtttcagaacatgtcaaaatagaaacaggcaatccattctttcaaacatcacatagtggttgtgcgacgggcggatcctgtaattgttcattataaaaaacatcgagtcagaaaaagatggttattgaaaccatttactagcatctgactcgatgtttttgtttattgtttgttgtttattgattgtttgaattgttgtgctaaatctggtcgatctgtcacaatcgtgtgtgcacctttttggtataaatcattcatcagatctatactatttacgccataatagcctggaatgacattcatataatttaaccatttgataaaacgagatgaagtcaaattaatacctttaaaatgagtaggcatttggaacgtttgtgctaatggttggtagtacctaccacctaataaatgatattttaaaaatgcctctgtaacttcctgttggctagcaccaattgcaacagatctttgtgcaattttattaaaacgtacgatttgttctttataaaaaattgtcacaagaacacggtcaaatgcttgattctctgcaattgtatcaaacataatttgtggtgcgattgagccttcataggattcaggagcatcctttaagtctacgtttatatacatatcaggatattgcttcagcaactcatcgaaggttagtatagctgtgtgtgcatgaccacgatatggtgttagtccattgatatctttgaagtgataacctgcgtctaatttttttaattctgctaatgtatgggcactgacttttccagagccgttcgtcgttctatcgactgttgcgtcatgaaaaacgataagctgttgatcttttgtgagtctcacatctgtttcaaaaccatcaacgcctaattgttttgcatagtcaaatgcaagttgcgtttgctctggtcttaaagccataccaccgcgatgcgcaaatatatatggtgcattgcctttgaaaaaagcagggatggtttgctttttagtaatcactttatttttatttatcattaacaaactacttacaaatccagcaccgactagtaccgcatttaaaatgtttctgtttacttttttcataaaaaattcctcctcgtttacttttatagcttaacaaattcatagttctgactacagcaaaatgtgcggttaatcatatagtgttgctcttgagaattgaattaatataatgatgcttaatataatctaaatacatttatcgtgcaattacataagacataattaaggtagcttaatattttaaaattaataaagacatgatatgattaatgctgaaaataaatggagtgaggtttaaatgaatttaatcccaagaactagtattgtagtttatttaaaacatatgaaacatgaacgacaaatccgaaaatatggacatatcgttcattcaaatagagatcgtaaatttgtaattatgtatgtgaatgagcaagatgttgatcaaattgtacataaactaatgcaacttaaatacgttagacacattgatggctcaccatataaatacttaaagaaaacttacgaaaaagagaaacacgaaatatataattaatattattgaagttctggtatccatttttggagccttaacacactaattaaataattataatataacgataaatcatgaaatgcttgaggaggctgtacatcgatacctaaaattggtatgtcgaatttttcagcgcaatcattaatcatttgaaactttttatttgaatctggatatggatatttaatagcgttaatcatgatataaaatgcttggaaatgattgccagttgtagggttcataatgattgctacagatgactttttattttcagcttgtggtgaatgaaaatagataattttatcaatacgttgatggttatattcaatcatcgtcatgaattcgaacaaatctgttagaccttcaccaagtgtaataaatgtttgtttcattggtttatcattctcctttttctcaataaattatattaaataactaaatgaattggaagtgtgaacaacatgcgcgtcattgcaggtaaacataaaagtaaagctttagaaagtatggaaggccgtaatacgagaccaactatggataaagttaaagaaggtatctttaatagtttatatgatgtgtcaggtataggtttagatttatttgcaggaagcggggcgcttggaatagaagcactctctcgaggtatggataaggttatctttgttgatcaaaattttaaagctgtaaaagttattaaatcaaatcttgcgaatttggatttagaggcacaatctgaagtttataaaaataatgcagatagagctttaaaagcattgtcaaaacgtgatattcaatttgatgtcattttcttagacccaccttataataaaggtctcattgataaagctttaaaactaatttcagagtttaatttattgaaagaaaatggtatcatcgtttgtgaatttagcaatcatgaagaaatagactatcaaccgtttaatatgattaaacgttaccattatgggttgacagacacattgttattagaaaagggagaatagcatggaacatacaatagcggtcattccgggtagttttgaccccattacttatggtcatttagacattattgagagaagtacagatagatttgatgaaattcatgtctgtgttcttaaaaatagtaaaaaagaaggtacgtttagtttagaagagcgtatggatttaattgaacaatctgttaaacatttacctaatgtcaaggttcatcaatttagtggtttactagtcgattattgtgaacaagtaggagctaaaacaatcatacgtggtttaagagcggtcagtgattttgaatatgaattacgcttaacttcaatgaataaaaagttgaacaatgaaattgaaacgttatatatgatgtctagtactaattattcatttataagttcaagtattgttaaagaagttgcagcttatcgagcagatatttctgaattcgttccaccttatgttgaaaaggcattgaagaagaaatttaagtaataaaaataacagtattttaggtttatcatggtttacaatcctaaaatactgttttcatttgttaacgatattgctgtatgacaggcgtgttgaaatctgtttgttgttgcccgcttattgcattgtatatgtgtgttgctttgatttcatttgtgaagtaatgtgcattgcttttgttaatattggttatatattgtctttctgggaacactgtttttaaatgctttaaatattgtctgccacggtcgttcattgctaatactttaactgcgtgaatgtttctcgtaacatctgtaggtttaatgtttaataatacattcattaacagtctttggatatgcgtatatgtataacgctttgtttttagtgattttacaaaatgatgaaaatcagttgcttcattaatgtaagattttaaacgattttcaaaaccttcagtaacagtataaatattctttaatgactctgtagtcatagctatgatttgatatttcaaatatgggaatatttgatttaatgttatatgaggtgttacgtacaggtgttgaatatctttaggtaccacatgatgccaatgatcatcttgactaatgattgatgttctaatagatgtaccacttgcaaacttatgatgttgaattaatgaatcatgatgttgagcattttctcgcttaatagaaattgcattgatgtttttagcatgtttagcaattgctttcagataactaataccaagtatgttgttaggacttgctagtgcttcatgatgctctaataattcgctaatgatacgagggtagcttttaccttcttttactttttgtgaaaaggattcggattgttcaatttcattaatgctgtgagctaattgctttaatgttttgatattattattttcactaccaaatgcaattgtatcgacactcatataatctgcgactttaactgctagttcggcaaaatgatcgccagatgataaactggcagttgctggtagttcgataactaaatcagctgttgataatgccatttttgcacgagtaaacttattatagattgctggttcgccacgcatgacaaagttaccactcattattgcaatagtaacgtcagcatttgtaagttttttagattgattaatatgatattgatgcccattatgaaagggattatattctgtgattaagccaacgcttttcatttgcaattcgtcctttcggtattcattattaatattgtaacagaacatgatatgttaagaaaaaatcttgacaacttgttcttagaaagttaaaataaattttgtgcttgttagaggtgaagccatatgaaatggtcaattacgcaattaaggaaatatcaaggtaagccatttgaatttgatcaaacggtgagttttgacaatttaaaagaatcattagatttaattgatttatctccaattacaatccaaggtcagttaaccattaagtcaacagaagtcgttgcggatattcacattactggaacgtatacaatgccttgtgcacgtactcttgtaccagttaaagtcccactagatgtaactactacagaagtatttgatttagaagggtacaatcagtataacgatgatcaagatgatgtagatgaacactatcacattattaaagatggtatggttaatcttcaggatattgtcgaggatatagttattattgagaaaccaatgagagcttattcagagcaaagtgaccaaatgttgacagtaggtaatggttgggaagtaatcgatgaggatcaattagatgagcttgctaaacagcaagaacaagatgattcagaatcacgacaagttgatccaaggcttcaaaaattacaacaattatatgataaagagcaataagtagtttaattaatgatataatgttgttaattaaactaacatttagtatttttcgtttataatctaaggaggatatatcatggcagtaccaaaaagaagaacttctaaaactagaaaaaacaaacgtcgtacgcatttcaaaatttcagtaccaggtatgactgaatgcccaaactgtggcgaatacaaattatcacaccgtgtatgtaaaaactgtggttcttacaatggcgaagaagtagcagctaaataattttagttaatcaatataaaaagtcccgcttaaaataattgttttaagtgggactttttatattgcaaaaaataattggcggacgaggtatcggaatacctcatctgccaattaaaatttgttaatttaataattaaatataaagacgattaattagtttttacgttttctaggtaatacgaatgcaacgatactacttaaagctattaatgccattaatggtaatgtcatatctttattagattcttcaccagtttgtggtaatgatttagctttattttcttgtgtatttttattattttggctttgagtgtgtccatcatttgtgtttttaatgtttgctttttgtaatggagcactatcttttgcttcgctagaacctgctgaagtttgaacaacatcttttgttgtttctgaagaagcagttgttggttttgcaacattttgagtcgtagatactaccttagttggagttgtactacttgattctacttcagctttagctggttttgtaacaggcattttgtctttacctgactcactagatgcgtcattttctttttcaacacttggtgattgtttattgtcatctttttggctgtcttgtttttgtgattctttttcaacaggtggtgttgttggtttgctaggcatagctggagtagtttccttcttagctgagttgtcttgttgttcctttttattagttttatcggcattggctttagtaaatgcttctttatcaacgattctgacatggtattgtccatcataatcaatcgtttttacgtgaactttaacgatagcatcatatagagttttaccttcaacatatgggaagataatcgttctagtgttatttttagcatctttgctaattgttctaacacgttgaccttcaaccatgaaatctttccagtaatcgtcattagtagtttccattaccatatattttttgccattaagcatacctgttttaatagggtgtttaacaaaagtatccatcatagattcgttattctcaacactttcataaacaacatattttgtatcttgtaaatcggtcattttttcatttgttggttgtacattttggaattcagttatcgcggatttcacttgttcatctaaagcttttttcgtctcttctaatttcttcttgtattcagctttcaatttttcaggaagtttatcttgaattttatttaattcataaacttgtctttctagtgttttcgcttttttatatggcgctaataatttttcagctttataatcttcttcagttttgaatttatctgcactgttataaattggttgtgcgaattccattaatgtgtaatcgtatttttcttctttgttattgaagtgagttgaacttacgattttaactgcttttgttccatttgaaacagagaagcgaatgtaagcataatctttaacagtatcgtatgatactaatttaattggcaactttttgtcaccttcataaacttcaaattttctccaaaattgccctgattgtaatcctaattcaatttctggttttgaatcagtgaaaataactctagcaggtttaacagaacttgcataatgataaaactgttgagtgccatctttctttttcatttcaaaatcaattggacgagagtttggtgcgctatgatctttgtcttttattgcagggtttttaatcgcttctcttagttcctgattcaaaataggatatgtattgttgtcagcttttgctgcaggtttttcctcttttgcttccttaggggctttaacttctttaactgctttaacttctttagcttcttttgtttcagtagtaggggccacaacttctttattagatactgagacagcattagctactggtttagcttctggagctttttcagttgttgttgttgttggacttgcaactgcttcagtttttggttgtgcttctgtatttgtaacacctgtttcttcagctgcttttgcttcgccattggacattaataataaaagtgtactaatcgctacagatgcaacgcctagtgatgactttctaattgaataaaatgatttaaattctttttgctgtttgttcatgttgtagaaacaactcctaattgtatattatcaactgataatcattatcaattgattacttgtattgtacattgaaatggtagttaattgcaatgttattttataaaaaataacctatgttatagattatgtaatatctatgacataggttaaataaaatttaaaataaaaaatatattaagttatgagtatgacgaagatttatttagattcttttcttttgaaaagtaacaaagataatgaacctaaaagggcaagtgttgcgaaggcaactgtgctaataaagttatcaactgaagttaaaccagtttttggtaattctttagctttagaatcttttgaaggtccttgtttatgaacttcgttttgttttgtaactttgttagtttgttgtgatttattgtcacttacagcttgattgttgctttcagatttcgctgttgcaacatctttaacaggtgtttgaactttattttgatcttgagctgtttgtgttgttttcactgtacgagcactttgtgtttgactttgatcttttgtagcttcactacttacaacttttgtagtttgtctgttttcatttttgcttggtgcagttacagcaggtttaactttttcaactttaggttgaactggtttcgtttgctcagtaggtgttttaggttgagcaggttttggttgaaccggtttaacattgtttggttttgctgcgtcagctaatgtaggaattgctttttcaaattctaaatgcgtagtatatctatgattataattaatttgtggcacgacaatatgtacttttgtagttaaactcttatacccaggttcaacagcaacattgattgttctagtgtcagcttttttatcatcgttaacaacagttgttgctaattcttgattgtttgcattgtaaaatttgtattctttccagaatgatgcgttgttcaatacagcttggaaataatatttattattttgtttaatcactttaccagggtgttgcatatagtcatccatgtgtgacttctctgaagagccatctttttgcacttggaaattaattggttgtgatgttgcttgagaaacttgtgtgctttgattattagttgcgttcgtagcttctgttgccgcattaacttgttggctgtctgcgcctatgtatacaagggaacctaaaatgatagatgctgtacccattgtaatctttttcatagctgatgaacgttgttctgattgatacttactgtttaaataatgttttgtcatgttgttttcctcctaaggatacaaattatgtgttgttatatgagatgattaaccattgcaattgataatggttatcaattatactagcacatctattttcgtataacaataataaattgattataaaataaatattgacaatgataatcattattatttatgattttagtaaagacttaaaagcaatcataaaaaggaggattatgttttgaaaaatattttaaaagtttttaatacaatgattttagcgttaattatcatcatcgcgacattcagtaatactgcaaatgccgcagatagcggtactttgaattatgaggtttacaaatacaataccaatgacacgtcgattgctaatgactattttaataaaccggcaaagtacattaagaaaaatggtaaattgtatgttcaaataactgtaaaccacagtcattggattacaggaatgagtatagaaggacataaagaaagaattattagtaaaaatactgccaaagatgaacgaacttctgaatttgaagtaagtaagctaaacggtaaaatagatgggaaaattgatgtttatatcgatgaaaaagtgaacggaaaacctttcaaatatgaccatcattacaatattacatataaatttaatggaccatctgatgtagcaggtgctaatgcaccaggtaaagatgataaaaattctgcttcaggtagtgacaaaggatctgatggagcgactactggtcaaagtgaatctaacagttcgaataaagacaaagtagaaaatccacaaacaaatgctggtacacctgcatatatatatgcaataccagttgcatccttagcattattaatcgcaatcacattgtttgttagaaaaaaatctaaaggcaatgtggaataatgagaaatgttaaacaaattgctacaaaatctattatagctattattagcttaggtattcttacatatacaacaatgattggtagcgtgttggctgatgagataaaatatccatcagccaaatttaatcaacctgaagcaaaagataaaacagaattaacttcatcaatttttgatgaaaagataaaagagaataaagcgttagaattactaatttttaatcaagaaaataaaaatgtaactgaggaacaacaactagttgacgaaaaggcgcaattgatttcagatatgactggtaaaatttacttgcaagtaaaactaaaaggtcaaattgataaagaacaacttgtttttcaaaatgacaaaaatgaagaattcccctttgttataaaagatgaaaaggatgacacaatagtaagaattttaattgaacagcatatggataaaatcaatatgcatgttaaaacgttggctgaaaagaaagatctagataacaaagaaatgctgtattctattcattttaaagagaaaaaagtacaacatgacgatgcaaaagaagtgccttcaaaacatcaaaatcaagaaaataatcaagatcagcttaaaaaagatattgatgacaaaaaagatagtcaaaaatcagacattaaggaaagacgtactagcctttttactgaaaaaggattaaatgatattcctgtacaaaaagataaagtgcaacaagacagtaataaaaagattgaaaacgagcgacctaaagcatcaggtacattaaaagttgaaaatagccctccaacagtaaaaaaggttgaaaataatcacaaagagcaaccgaaacataaagatgaaaaatcaaaaaaggaaaagaaaaaagtagttgaaaaagaaaaagcgttaccagcttttaatagagatgatgatagcaagaatagtagtcaattatctagtgatattaaagaacttgatgaaccaaatcataaaaagcaatatatgttatttgcagttggcattgtgttagcaaccattttacttatttcggcacatttatacagcagaaagagaggtaaccaagtttgagaatcataaagtatttaaccattttagtgataagcgtcgttatcttaaccagctgtcaatcttccagttctcaagaatcaactaaatccggcgaattcagaatcgtaccaacaactgttgcattgacaatgacattggacaaattggatttaccaattgtcggcaaacccacgtcatataagacattgcctaatcgttataaagatgtaccggaaattggtcaaccaatggagccgaatgttgaagctgttaaaaagttaaaaccaacacatgttttgagtgtgtcaacgattaaagatgaaatgcaaccattttacaaacaattaaatatgaaaggctacttttatgattttgatagtttaaaagggatgcaaaagtcgattacacaattaggtgatcaatttaatcgtaaagcacaagcaaaagaattaaatgaccatttaaattctgtaaagcaaaaaattgaaaataaagcagctaaacaaaagaaacatcccaaagtattaatattaatgggtgtacctggtagctatttagtagcaactgataaatcatatattggtgatttagttaaaatagcaggtggagaaaatgttattaaagtgaaagatcgtcaatatatttcgtctaatactgaaaatttgttgaatatcaatccagatattattttacgattaccacacggaatgcctgaagaagttaagaaaatgtttcaaaaagaatttaaacaaaatgatatttggaaacattttaaagctgtgaaaaataatcatgtttatgacttagaggaagtgccattcggtattacagcaaatgttgatgctgataaggcaatgactcaattatatgatttattttataaggataaaaaatagtgagttgatatgatgataaaaaataaaaagaaactactatttttatgtttgttagtcattttaatcgcaacggcttatatttcgtttgtaaccggtacaattaaattgtcatttaatgacctatttacaaaatttacaactggtagcaatgaagcagtggattcaattattgatttgcgattgccacgtatattaattgcattgatggttggcgcaatgttagcagtttctggagcattattacaagcagcactacaaaatcctttggcagaggcgaatatcattggcgtttcatcaggtgcacttataatgagagcactttgtatgttgtttattccacaattgtacttttacttaccattattaagttttattggaggtttaataccatttttaataattatattgttgcattctaaatttagattcaatgctgttagtatgatattagtaggtgttgcgttattcgtattattaaatggtgttttagaaattttaactcaaaaccctttaatgaaaattcctcaaggcttaacaatgaaaatttggagtgacgtatacatattagcagtatcagcattattgggattaatattaacattactattgtcccctaaattgaatttactaaatttagatgacatacaagcgcgaagtatcggttttaatattgatcgttacagatggttaacaggtttattagcagtatttttagcaagtgcaactgttgcgattgttggacaactagcctttttaggtattattgtgccacatgtggttagaaagctagttgggggcaattacagagtacttattccgttttctacagttattggtgcatggctattgttagtggctgatttattaggacgagtgatacagcctcctttagaaattccagccaatgctattttaatgattgtcggtggtccaatgctaatttacttaatttgtcaaagtcaacgaaatcgaatctaaaacggtacaacaactggtttagtgatgactgaagaaacgtcgttaataaaagaggatttttatgagaatgaagcgatttttaactattgtacaaattttattggttgtaattattatcatttttggttacaaaattgttcaaacatatattgaagacaagcaagaacgcgcaaattatgagaaattacaacaaaaatttcaaatgttgatgagcaaacatcaagcacatgtgagaccacaatttgaatcacttgaaaaaataaataaagacattgttggatggataaaattatcaggaacatcattgaattatccagtactacaaggtaagacaaatcacgattatttaaatttagattttgagcgagaacatcgacgtaaaggtagtatttttatggattttagaaatgaattgaagattttaaatcataatactattttatacgggcaccatgtcggtgataatacgatgtttgatgtgttagaagagtatttaaagcaatctttttatgaaaaacacaagataattgaatttgacaataaatatggtaaatatcaattgcaagtatttagtgcatataaaactactactaaagataattacatacgtacagattttgaaaatgatcaagattatcaacaatttttagatgagacaaaacgtaaatctgtaattaactcagatgttaatgtaacggtaaaagataaaataatgactttatcaacgtgcgaagatgcatatagtgaaacaacgaaaagaattgttgttgtcgcaaaaataattaaggtaagttaaacagaaaagaggataattatgaaatttatggcagaaaataggctgacgttaacaaaaggaacagcaaaagatattatagaacgattttacacgagacatgggattgaaacattagaaggctttgatggcatgtttgttacacaaactttagaacaagaagattttgatgaagtgaaaattttaacagtttggaaatcaaagcaagcttttacggattggttaaaatctgatgtctttaaagcagcacataaacatgttagaagtaaaaatgaagatgaaagtagcccgattattaataacaaagtaattacatatgatataggctatagttacatgaaataattgaatttaaaaaggttgcagtacttgttatgacaattggtattgttagcttttgtaacgaccatacatgataccgatgatggtcgtttttttaatgaacacaaacatgctaacaacaaattgctaaaacgtagtttgatatgaatgtgctttgaaaataatcatcaaatatatgattttgatttattttgaagaagaaaagaattaataatgatattttggggcgtatgatttatagtagtagtatcgataaaagaaatttatacaatttgaaataatatgagtgataaaatcgattaattaatattaactatacaatcaaatgttttcatcttattaatgattaatatttttatttttaaaaataaagcgaggagctatctatggaacaaattacttctgcacaaaataatagaattaaacaagcgaacaagctaaaaaagaaacgtgagagggataaaactggattagctttaattgaaggtgtgcatttaattgaagaagcttatcaaagtgggattgtaattacacaattatttgcaattgaaccggcaagattagatcagcaaattatcgcatacgcgcaagaagtttttgaaataaacatgaaagttgctgaatctttatcaggtacagtgacaccacaagggtttttcgcaatcattgagaagccacaatatgatatttctaaagcacaacaagtattgcttatcgatcgtgttcaagatcctggaaatttaggcacattaattagaactgcggatgctgctggaatggatgctgtaataatggaaaagggtacgacagatccttatcaagataaagtgttgcgagcgagtcaaggtagtgtttttcatttgccagttatgacacaagatctcgatacgtttattactcagtttaatggtcctgtttatggtacagcacttgaaaacgcagtggcatataaagaagttacttcaagtgattcttttgcattactattaggtaatgagggagaaggtgttaatcctgaattattagcacatactacacaaaatttaatcatacctatttatggtaaagctgaaagtttaaatgtagcgattgcaggtagtattttactttatcatttgaaaggttgaccgtgttgaaagttttccgatataattataattaattgtttaacagaacatttctacgtgattgcatacacaattgaatataaaccaataaaaaggcatggacatttatataaataattgttttagggagaataatcgtgactgcaagttattccaattatttaaagtcttttcacctttttggttacttaaagagatttaagtcggaaagacaatccgttatcaatattaaacaagtgtatgcttaggcataaatttgggtggtaccacggaaatgactttcgtcccttattttttaagaggatgaaagtctttttttagttaaacaacaaatatgataaatagaaaatgaatagttcgaatagggaggtcagtgacatatgtctgaacaacaaacaatgtcagagttaaaacaacaagcgcttgtagatattaatgaagcaaatgatgaacgtgcactgcaagaagttaaagtgaaatacttaggtaaaaaagggtcagttagcggactaatgaaattgatgaaggatttgccgaatgaagagaagcctgcgtttggtcaaaaagtgaatgaattgcgtcaaacaattcaaaatgaattagatgaaagacaacagatgttagttaaagaaaaattaaataagcaattggctgaagaaacaattgatgtatcattaccaggtcgtcatattgaaatcggttcaaagcatccattaacacgtacaatagaagaaattgaagacttattcttaggtttaggttatgaaattgtcaatggatatgaagttgaacaagatcattataacttcgaaatgctgaatttacctaaatcacaccctgcacgtgatatgcaagatagtttctatattacggatgaaattttattacgtacgcatacatcaccagtgcaagcacgtacgatggaatcacgtcatggtcaaggtccagttaaaattatttgccctggtaaagtgtatcgtcgtgactctgatgatgcgacacatagtcatcaatttacacaaattgaaggattagttgttgataaaaacgttaaaatgagtgatttgaaaggtactttagaattgttagctaagaaattatttggtgctgatcgtgaaattcgtttacgtccaagttacttcccattcactgaaccttctgtagaagttgatgtgtcatgttttaaatgtaaaggaaaaggttgtaatgtgtgtaaacacacaggatggattgaaattttaggcgctggaatggtacatcctaatgtattagaaatggctggttttgattcttcagagtactctggatttgcatttggtatgggaccagaccgtattgcaatgttgaaatatggtatagaagatattcgtcatttctatactaatgatgtgagatttttagatcaatttaaagcggtagaagatagaggtgacatgtaatgttgatatcaaatgaatggttgaaagaatatgtaacaatcgatgattctgtaagtaatttggcagaacgtattacgcgcacaggtattgaagtggatgatttaattgactacacaaaagatatcaaaaatttagttgttggcttcgttaagtcaaaagagaaacatcctgatgctgataaattaaatgtttgccaagttgatatcggagaagacgaacctgtacaaatcgtatgtggtgccccgaacgttgatgcaggacaatatgtcattgttgctaaagtaggtggtagattgcctggtggtattaaaattaagcgtgccaaattacgcggtgaacgttcggaaggtatgatttgttcgttacaagaaattggtatttcaagtaactatataccgaaaagttttgaatcaggcatttttgtatttagtgaatcccaagttccaggaacagatgccttacaagctttatatttagatgatcaagtaatggaatttgatttaacgccgaatcgtgctgatgctttaagtatgataggtactgcttatgaagttgcagcattatataatacaaaaatgactaagccagagacaacatcaaatgagcttgagttatctgcaaatgatgaactgactgtgacaattgaaaatgaagataaagtaccatattatagtgcacgtgttgttcacgacgtgacaattgaaccttcgccaatttggatgcaagtacgcttaataaaagcaggtatacgtcctattaataatgttgtcgacatctcaaattatgtgttattagaatacggtcaaccattgcacatgtttgatcaagatgcgattggttcacaacagattgttgttcgtcaagctaatgaaggcgaaaaaatgacaacattagatgatacagaacgtgaattattaacgagcgatattgttattactaatggacaaactccaattgcattagctggtgttatgggtggcgatttttcagaagttaaagaacatacatcaaatatagttattgaaggtgctatttttgatccagtttcaattcgtcatacatcaagacgtttaaatttacgcagtgaatcatctagtcgttttgaaaaaggaatagctactgaatttgtagatgaagcagtcgaccgtgcatgttatttattacaaacttatgcaaacggaaaagtgctaaaagatagagtgtcttcaggagaacttggtgcatttattacaccaatcgacatcactgctgataaaattaatcgcactattggatttgatttgtcacaaaatgatattgttactatttttaatcaattagggtttgatacagaaataaatgatgatgttattacagtgcaagtgccgtcacgtcgcaaagatattacaattaaagaagatttaattgaagaagttgcacgtatttatggttacgatgatattccttcaacattacctgtcttcgaaaaagttactagtggtcagttaactgatcgccaatataaaacgagaatggttaaagaagtgttagaaggtgctggattagaccaagctattacgtattcgttagtttctaaagaagatgctactgcatttgcgatgcaacagcgtcaaacaattgatttattgatgccaatgagtgaagcgcatgcgtcattacgtcaaagtttattaccacatttaatcgaagcggcatcatataatgtggcacgtaaaaataaagatgtaaaattatttgaaatcggcaatgtcttctttgctaatggtgaaggtgaactaccagatcaagttgaatatttaagtggtattttaactggagattatgtagtcaatcaatggcaaggtaagaaagaaacggttgatttttatttagcaaaaggtgtcgtggatcgagtatctgaaaagttaaaccttgaatttagttatcgtcgtgctgatattgatggattacatccaggtcgtacagctgaaatcttattagagaataaagttattggttttattggtgaattacacccaacattagcagctgataatgatttaaaacgtacgtatgtttttgagttgaattttgatgcattaatggctgtgtcggtaggttacattaattaccagccaattccgagattcccaggcatgtctcgtgacattgcattagaagtagatcaaaatattccagcagctgatttattatcaacgattcatgcacacggtggcaatatattaaaagatacacttgtctttgatgtatatcagggcgaacatttagaaaaaggtaaaaaatcaattgcaatacgtttaaattatttagacacagaagaaacattgacagatgaacgcgtttcaaaagtacaagcggaaattgaagcagcattaattgaacaaggtgctgttattagataatgatttaaaccccatgtataaggatatctgaagtagattgatatcactaacatggggttttatttttggattcacctattaggttccatttcatttataaatcaaagaggaagagtggttttcagttgatgctttgcacaactgcatataaagtcatacttatgaacaaagcaaattagtatgacttacctaataggatttcctattaggatccaatttatcttgattataaatcatagaggctcagcggattacagttgatgctttgcacaactgcataaaagcctctaatgattataaatcaaagaggctttaaaattttttgggctttttcacgatttttgaaatgtttttttgaaatggaatctaaacgtgaaataccgtaattttttattattttggcggcgattacatcgactttagcaccagcacctttaggaatcgtcatattaatattttttgatatttgatccatatatgtaataaatgcgtatctagaaattatgcttgccactgcaatggctaatgacttcgattctccttttgtttcaaattttgttttctttggaagtggtatatcagataatgcgtaatggctatacacttcgcgttttgcgaactgatcaatgacgatataatctaattgagacgaatcaattttttcaagtacatttttgatggcttcattatgaagaacagctttcatttttacttgagtccagccttttgcttgctgaatattatatttttcattgtgtagtgttaatagtgaatgtgggatgaaagtaaccaattgctcagcaagttctacaattttagtatcggttaatttttttgaatcatctacacccaaagtttttaaaatagggacatgctctttggtaacaaaagcagcacacacagtcaacggaccaaagtaatcgccacttccagcctcatcactaccaatacagttaaattgatcatacattaaagtctgttcaagagaagaattggccgtatttttctttttagttttattagtattcaattgagaatgctgcggtagaagttcttcagacacagcttctgcatgattaccttgaaacatgactttacctgattggtaaatatttacagttgtattttgatactttgcacgtgctttcataccttgaggtaaattctcagtatcaaaagaaatgcgtgacattaatgtcgttatgtctttatccgacaatttaaaaacgatattcgccatttgtgtaaatcctttcgtaataatttcattatcattagcaaaaataatcatatcataaatgataataacgtcagaaacatttatatatgttgtaaagaattaattgcggatacttacaaaatacatagtggtcatgtataatgtttatgaaaatgttatagtgacacaatttaaacatggtaaagtattgaatagaaaattctttacattatttcatttcattataaaaagaacattaagtcatctatagagattgtgttgttgttttatcataattgcaatataacaatattagtatcaaattcagacaaactatccagtcatattttataacgtgaatttagattttaaaaaaaggatcaggagaaattataaatggcacagtttaaaaacaaggtaaatgtatcaattaatgatcagctttttacaattgttggggaagataacccagagcacatacgatatgtagcacatttagttgatgataaaataaaagaattagggtataaagcagcaggtttagatacttcaagaaaagcaatactaactgctgtgaatattatgcatgaaaaagtactactagaagaagaaaatcgacgtttgaaacaacaaattcacaaattgcagcagcgtgagcaataaatgatcattgattttatcataatcattttctttgtgtattttgtcatcgttggattcagacgaggtttttggttatctatgatacatttgagtgcaacgattgtatcattgtggattgccagtcaattttacaaatctattgtagaaagattaattgtatttattccatatcctaaaacaacagcatttaatacaacttttgcgtttcattttaatcatctacaaaatcgatttgaagcgattgtagcttttttaatgattgcattgttttgtaagttcattttatatctaattatcgtaacttttgataaaataatagcgtatcaaaacattcatattttcagtcgtgcaatgggaatgatagttggtgtgtttatgacgataattgtcttacactttacgttatatctattggcattatatcctaacgaagcattacaacatcagcttaaaatatctattgtgagtcattcattgatttttcacatcccatatttatcggctttcaccattaatttataaattatcataagaggtcaggacaaaggtatatattaatgatacgtcctggtcttctttttatggagtgttattatgacaaaaaaagatgttatcaaactattagaacaaattgctacttatatggaattaaaaggggaaaatacttttaaaatatcagcgtatcgaaaagcagctcaaagtcttgaattagatgaacgaccattagatgaaatatctgatgtaacggagttaaaaggcattggtaaaggtgttgcagaagtaatcaatgattaccgtgagaccggtgaatctcagtatttacagcaattacaggaagaagttccggaaggtcttattccacttttgaaaattcaaggacttggaagcaagaaaattgctaagctatataaagagttgaatattgttgataaagcttcacttcaagttgcttgtgaaaatggaaaagttagtgaattaagcggatttgctaagaaaacggaacaaaacatattagaagctgtgaaacaacttggtgctaagaaagatagatatccaattgatcaaatgagaagacttaatcaagaaatcattgattatatagatacattaaattatatcgatcaatattcatctgcaggaagcttccgtcgttttaaagaaatgagcaaagatttagatttcataataagtaccgataacccaaaagcagtgcagcagcaattattaaatattcccaataaagtaaaagaagttgcagtggggaacacaaaagtttcattagaattagcgtatgatgatgaaacgattggtgtcgattttcgattaattgaaccaagggctttttatcatacattgcagcattttactgggtcaaaagaacataatataagaattcgacaacttgctaaagcacgggatgaaaaagtaagtgaatatggaattgaacaagctgatggtacattaattcaatatgatagtgaagccaaaatatatgaacattttaatgtgaattttataccacctgctatgagagaagatggtagcgaatttgataaagatctaagtaatatcattacattagatgatattaatggtgatattcatatgcatacaacgtttagtgatggtgcgttttccattcgagacatggtagaagcaaatatcgcaaaaggttataaattcatggtaattactgatcattcacaaagtttacgtgttgctaatggcttacaagtagaaagacttttaagacaaaacgaagaaattaaagctttagataaagaatatagtgaaattgatatttattcgggtacagaaatggatatattacctgatggctcgctggattatgatgatgaaattttagcacaacttgattacgtaattggagctattcatcaaagctttaaccaatcagaagaacaaattatggaacgattagctaatgcatgtcgcaatccatacgtgcgacatatagcgcatccaacagggcgtattataggtagaagagatggttataaaccgaatattgaacaattaatggcattagctgaagaaacgaatacagtattagaaattaatgccaatccacatcgactggatttgagcgctgatatcgttcgtaaatatccaaatgtgaaattaactattaacactgatgcgcatcatacaaatcatttagattttatgaattatggcgtagcaactgcgcaaaaaggatttgtaacaaaagatagagtgattaacgcattatcgcgtgaagcttttaaagactttattgaaaataatataaaacttaagaaatagagggattttatgagacaaaaaacattagacgtcttagaatttgataaaataaaatcactcgttgccaatgaaacaattagtgacttaggcttggaaaaggtcaatcaaatgatgccagctactaattttgaaacggttgtttttcaaatggaagaaacggatgagattgctcaaatctataataagcatcgtttaccaagcttgagtggcttatctaaagtatcagcattcattcatcgcgctgatattggcggcgttttaaatgtatcagagcttaacttgataaaaagattaattcaagtacaaaatcaatttaagacattttataatcaattggttgaagaagatgaaggtgttaaatacccaatattagatgacaagatgaatcaattacctgtgttaactgatctttttcaacaaataaatgaaacatgcgatacgtatgatttatatgataatgcgagttatgaattgcaagggattagaagtaaaatttctagcacgaatcaacgtattagacaaaatttggaccgtattgttaaaagccaagcaaatcagaaaaaattatcagatgctattgtaacagttaggaatgaaagaaacgttatacctgtcaaagctgaatatcgacaagattttaatgggattgtacatgatcaatctgcttcaggacaaacattgtatattgagccatcatcagttgttgaaatgaataatcaaattagtcgattacgtcatgatgaagcaattgaaaaagaacgcattttaacgcaactaactggttatgttgctgcggacaaagatgcactacttgtggcagaacaagtcatgggtcagttagattttttaatcgcaaaagcgagatatagtagaagtattaaaggaacaaagccgatatttaaagaggaacgtactgtatatttacctaaagcataccatccattattaaatcgtgagactgttgtagctaataccatcgaatttatggaagatattgaaacggtaattattacaggaccgaatacaggtggtaaaacagtaacattaaaaacattaggtttaattattgttatggctcaatcaggattgttgattccaacacttgatggtagtcagttgagtgtatttaaaaacgtatattgcgatatcggagatgaacaatcaatagaacaatcattatcaactttttcatctcatatgacgaatatagttgaaattttaaagaatgcagacaaacatagtttagttttatttgatgaattaggtgcaggtacagatccaagtgaaggtgctgcattagcaatgagcattttagatcatgttagaaaaattggttctctagtaatggcaacgacgcactatcctgaacttaaagcatatagttataatcgagaaggcgttatgaatgcgagtgtagaatttgatgtagatacattgagtccaacgtataagttattaatgggtgtgccgggtcgttcaaatgcttttgatatttctaaaaagttaggtcttagtttgaatattattaataaggctaagacgatgattggtactgatgaaaaagaaataaatgaaatgattgaatcattagagcgtaattacaaacgtgtagagacacagaggttagaactggaccgtcttgtaaaagaagcggagcaagtgcatgatgatttatctaagcagtatcaacaattccaaaattatgaaaaatctctaattgaagatgctaaagaaaaagcgaatcaaaaaattaaagcagcaacaaaagaagctgacgatattattaaagacctaagacaattgcgtgaacaaaaaggtgcagatgttaaagaacatgaattgattgataagaagaaacgattagatgatcattatgaagcgaaatctataaagcaaaatgtacaaaagcaaaaatacgataaaattgttgctggtgatgaagtaaaagtattatcttacggtcaaaagggtgaagttttagaaattgtcaatgatgaagaagcaattgttcaaatgggaattattaaaatgaagttacctattgaagatttagagaaaaaacaaaaagaaaaagttaaaccaacgaaaatggttacacgtcaaaatcgtcaaacaattaaaactgaacttgacttacgaggctatcgttatgaggatgctttaattgaactagatcaatatttagatcaagccgttttaagtaattacgaacaagtttatatcattcatggtaaaggtacaggtgcacttcaaaaaggtgtacaacaacatttgaaaaagcataaaagtgttagtgactttagaggtggtatgccaagcgaaggtggatttggcgttaccgttgcaacactaaaataaattataatttgataaattaattagctgcagttaaaataatgtaaagcaacaagaatacatttcaaacatgttatttgaaataagcataaaaattgagcaaatagaaatacatgaagcatgttatctgatataatttgaacatcataataataattaaggaggattggcatttatggcaatcgttaaagtaacagatgcagattttgattcaaaagtagaatctggtgtacaattagtagatttttgggcaacatggtgtggtccatgtaaaatgatcgctccggtattagaagaattagcagctgactatgaaggtaaagctgacattttaaaattagatgttgatgaaaatccatcaactgcagctaaatatgaagtgatgagtattccaacattaatcgtctttaaagacggtcaaccagttgataaagttgttggtttccaaccaaaagaaaacttagctgaagttttagataaacatttataagttacaaccaatgacgactggggcatttctttaatgaattgctccagtttttgtttgtgtttttaatatataaagttgaatgataagtcatcatattgtttacgacttgagaatggtgggattaataaatctatgaacgttaaatgataatcaaacatgctgatagatatgtaatagttggtttgataaaacaatgttcaatattacatgatgtgcatgaaaagtcgtactcgaagatgttgattatgaactagaattagcggtgataaatttgaagcgctttcgtagcatcattcattttaaaattagaaggggggatatttttggaagactataagaaacgaattaaaaataaattaaatgtcgtacctatggaaccaggctgctatttaatgaaagatcgtaacgatcaagtgatatatgttggcaaagctaaaaagctaagaaatcgattgcgatcatattttacgggcgctcatgatgctaaaacaacgagactggttggtgaaatacgtcgctttgagtttattgtcacgtctagtgaaacagagtcacttttacttgaattaaatctgattaaacaatatcaaccaagatataatatattattaaaggatgataaaagttatccatttattaaaattacgaaggaaaaatatcctagactactagtgacgagaactgtaaaacaaggtactggtaaatatttcggaccgtatccgaatgcatattctgctcaagaaactaaaaagttattagacagaatatatccatatcgcaaatgtgataagatgccagataaattatgtctttattaccatattggacaatgtttaggaccatgtgtatatgacgttgatttgagtaaatacgcacaaatgacgaaggaaattactgattttctgaatggggaagacaaaacaattttaaaaagtttagaagaaagaatgttaactgcaagtgaatcacttgattttgaacgagctaaagaatacagagatttaattcaacatattcaaaatctaactaacaaacaaaaaattatgtcatcagataaaacgattcgtgatgtctttggttatagtgttgataaaggatggatgtgtatccaagttttctttataagacaaggtaatatgataaagcgagatacaacgatgattccattacagcaaacagaagaagaagaattttatacatttattggacaattttatagcttaaaccaacatattttacctaaggaagttcatgtaccacgtaatttggataaagaaatgattcaatctgttgtggacactaaaatcgttcaacccgcgcgaggtcccaaaaaagatatggttgacttagctgcacataacgctaaagtatccttaaataataaatttgaattaatatcacgtgatgagtccagaacaattaaagctattgaagaacttggaacacaaatgggaattcaaacaccaattagaattgaagcattcgataattctaatattcaaggtgtggatccagtgtcagcaatggttacatttgtcgacggtaaaccagacaagaaaaattatagaaagtataaaatcaaaacggttaaaggtccagatgattacaaatcaatgagagaagtagtaagacgacgatattctcgcgttttaaacgaaggattaccattacctgatttaataatagtagatggtggtaaaggacatatgaacggggttattgatgtgctacaaaacgaattaggtcttgatatccctgttgcaggtttgcagaaaaatgataaacaccaaacatctgaattattatatggcgctagtgcagaaattgtaccactgaagaaaaatagccaagcattttatttgttgcaccgtatccaagatgaggttcacagattcgcaatcacatttcatagacaaacacgtcaaaagacaggcttgaaatcaatccttgatgatatagatggtatcggtagcaaacgtaaaacattattattgcgttcattcggttcaatcaagaaaatgaaggaagctacacttgaagattttaaaaatataggtattcctgaaaacgttgcaaagaacctacatgaacaattgcataaataaattacagggcgtgagaatcattctcatgccccaaaatatatgaaataatgttacaatatggttaacaaagttatttttttgaatgtacgtggaagcgttttctaaatgagaaagtttatcatcacaagcaatcttaaatattaaatccaaattttacattgttcgacatgcagtttggtgatcgtgcagtgtgtatttgtctttaaaatgtttcgcttaatgataatgacaacgctagaaacgatatcactttagggggttaagcgtacgtttaatataaatagctcaataaattaaatattcgttcacaggggggactccttttggctcaatcaaaaaatgaattttatctaagacgtattcactcgttattaggtattatcccaataggtgcatttttggtcgttcatttattagtgaatcaccaagcaacacaaggtgctgaagcgtttaataaagcatctaactttatggaatcattaccatttctaattattgtagaatttttatttatatacattccgttgttatatcacggtttgtttggtatacacattgcatttacagcaaaagaaaatgttggacattactcgatttttagaaactggatgttcttcttccaaagagtgagtggtatcttaacatttatctttattggtatccatttatggcaaacacgtttacaaaaagcattttacggcaaagaagtgaattacgatttaatgcatgaaacattgcaacatcctggatgggcaatattttatattatttgtattattgctgttgtgttccactttgcaaatggcttatggtcattcttagttacttggggtggacttcaatctccaaaatcacaacgagtatttacatgggtttcattaatcgtattcttagttatttcgtatattggtgttactgcaattattgcctttatgtaatacatcgcatttaacaaatatagattgaaaatttaggggagtgaaatttttatggcagagaaacatcttattgttgtcggaggtggcctagcgggcttaatgtcaacaattaaagcggcagaaaaaggtgcacatgtagatttgttctcagttgtaccagtaaagcgttcgcactctgtttgtgcccaaggtggcattaatggtgcggtcaatactaaaggggaaggcgattctccttggattcactttgatgatacagtgtatggtggcgacttccttgcaaaccaaccacctgttaaagcgatgacagaggcagcacctaaaattattcatttattagaccgtatgggcgtaatgttcaatagaacaaatgaaggtctattagattttagacgtttcggtggtacattacaccacagaacagcatatgcaggggcaacaactggacaacaattattatatgcattggatgaacaagttcgtgcatatgaagtagatggattagttacgaagtatgaaggatgggaattccttggcatagttaaaggtgacgatgatagtgcaagaggtatcgttgcacaaaatatgacaactgctgagattgaaacatttggttcagatgcagttattatggcaacgggtggccctggtattattttcggtaaaacaacaaactcaatgattaatacaggatcagcggcttccattgtttaccaacaaggcgctatttatgctaatggtgagttcattcaaattcatcctactgcaatacctggtgatgataaactacgactaatgagtgaatcagcacgtggtgaaggtggacgaatttggacatataaagatggtaagccttggtacttcttagaagagaaatatcctgattatggtaacttagtacctcgtgatatcgcaacgcgtgaaattttcgatgtatgtattaaccaaaaattaggtattaatggcgaaaacatggtatatcttgatttgtcacataaagatccacatgagttagatgtaaaactaggtggtatcattgaaatttatgaaaaattcactggtgatgacccacgcaaagtaccaatgaagattttcccagctgtccactattcaatgggtggtctatatgtagattatgatcaaatgacaaatattaaagggttatttgcagctggagaatgtgacttctctcaacatggtggtaaccgcttaggtgccaattcattgttatcagcgatttatggtggtacagtagcaggtccaaacgcgattgattatatttcaaatattgatcgatcatatactgatatggacgaaagtatttttgaaaaacgtaaagctgaagagcaagaacgttttgataaattattagctatgcgcggtacagaaaatgcatataaattacaccgtgaacttggtgaaattatgacagcaaatgtaactgttgttcgtgaaaatgaaaaactgttagaaacagataaaaagattgttgaattgatgaaacgttatgaagatattgatatggaagatactcaaacttggagtaaccaagcggtattctttactcgtcaattatggaacatgttagtacttgcacgtgtgattacgattggtgcatataaccgtaacgaatcacgcggtgcccattataaaccagaattcccagagcgtaatgatgaagagtggttaaaaacgacaatggcctcattccaaggcgcatttgaaaaaccacagtttacttatgatgacgtcgatgtgagtttaataccacctcgtaaacgtgattacacaagtaagtctaaagggggtaaaaaataatgactgaacaatcagtgaaaaacactccacaacatgaaatacaatctaaaccgaaacaaaaaacagtaaaattaattattaaacgacaagatacaagtgattctaagccttatgaagaaacatttgaaattccatatcgtgaaaatttaaacgtcattgcatgtttaatggaaattagacgtaacccagttaatattaaaggtgaaaaacaacacctgttgtctgggatatgaactgcttagaagaagtatgtggagcatgttctatggttatcaatggtcgtgcaagacaatcttgttctgcgattgttgatcaattagaacaacctattcgtttagagccaatgaatactttcccagttatccgtgacttacaagttgatcgttctagaatgttcgataacttaaaacgtatgaaagcatggatcccaattgatggaacgtatgatttaggtccggggccacgtatgccagagaaaaaacgtcaaacagcttatgaattatctaaatgtatgacatgtggtgtatgtttagaagtttgtcctaatgttactgaaaataataaattcgttggtgcgcaagcaatctcgcaagttcgtttgtttaatttgcacccaacaggatctatgactaaagatgaacgtttaaatgcattaatgggtacaggtggcttacagcaatgtggtaattcacaaaactgtgttaatgcttgccctaaaggtattccattaacaacatccattgcagcaatgaacagagaaacaacattccacatgtttaaatcattctttggttcagaccatgaagtagaataaaaattaatcccttttgagttaaaatgttatgttcctttcaaaattaaattgaatggagatacacaaaaacttagaagggattttttatagttacattacatgacaatatgatagtgagctaatttaaaataagtattatattataatgacaaaaatggtaaacacagtgcataatactaaaatccaatgcttagttatgataaactaaaaattaaattaaaagtaaggatgaccgaatatgaataaaccaataggtgtaatagactctggtgtcggaggtttgacagtagctaaagaaattatgcgtcagttgccaaatgagacgatttattacttaggtgatattgggcgatgtccatatgggccaagaccaggagaacaagtaaaacaatatacagttgaaatcgctcgtaaattaatggaatttgatataaaaatgctcgtgattgcttgtaatactgcaactgctgtagctttagaatatttacaaaagaccttatcaatcccagtgattggcgtaattgaaccaggtgctagaacagcaataatgacgactagaaatcaaaatgtattagtactaggaacggaaggcacaattaaatctgaagcatatcgaacacatattaaacgtataaatccacatgtagaggtacatggcgttgcctgtccaggttttgtgccacttgtagaacaaatgagatatagtgatccaacaattacaagcattgttattcatcaaacactgaaacgttggcgtaatagtgagtctgatactgtcattttaggatgtacccactatccattgctctataaacctatctatgattattttggtggtaaaaagacagtgatttcgtctggattagaaacggctcgtgaagttagtgcattgctaacatttagtaatgaacatgcaagttatactgaacatccagatcatcgattttttgcaacaggtgataccacacatattactaacattatcaaagaatggctaaatttatctgtcaatgtggaacgtatatcagtgaatgactaggaggatttttaatgaaagagattgttattgcatcgaataatcaagggaaaataaatgactttaaagtgatatttccagattaccacgtaataggtatttcagaactaatactagattttgatgtggaagaaacaggatcaacatttgaagaaaatgctatattaaaatcagaagctgctgcaaaagcattgaataaaacggtcatagctgatgacagtggactagaagtttttgcattaaatggtgagccaggtatatactctgcacgttatgctggtgaaaataaaagcgatgaagcaaatattgaaaaattattaaataagcttggtaatacaactgatcgtcgtgcacaatttgtttgtgtcataagtatgagtggccctgatatggaaacaaaagtatttaaaggtactgtttcaggtgaaattgcagatgggaaatatggcgaaaatggtttcggatatgatccgatattttatgtaccgaaattagatagaaccatggcgcaactttctaaagaacaaaaaggtcaaattagccatagacgaaatgcaattaatttattagaagcttatcttgcgggtgatcaaaatgtctaaatggattgttgtgagtgataatcatactgaatctggcattttataccaaatttacgaggcacacccagatgctgatatgtatttgcatttaggcgattcagaatttgagtatgatgatacagaacttagcttatttcgtagggtaaaaggcaattgtgatttttacccagaatttgaaaatgaagcggtcgcaaaatgtaatgacgtgagagcattttacactcatggacatttatatcaagtcaatcgaacaagatatttattagctgagcaagcacgtgaattaggttgtgtatttgctttttatggacatacacatgttgcaaaatatgagtatattaatggtgttcatgttattaatcctggaagtatatctcaatctagaagttcaatggaagaatcgtatgcggaagttttgattgatgatcaaacattacaaggtacagtgaattttaaaaaccgacaacatgaaacaattagtcatactactttttaaattaaaagtagctatggctttttttagtttatagactgatttaactaggaggtcgtgacatgaatgtttgtttaaaagtgttgctgacaatttttagaaggtaactggtatgaataacacatttatgttatgaaaagaattgtactttttgggaaagtgattgttgattgtcctatttggttgaatcctgttgattatttggttaaaagtgtattattaaaaagtataaaattaagattccaagaagtcaggaaatttgaaattttagttaaaatcatgaatcgtatacatatttaaaaggatttctaaaggcataaattatatcaataatttgatggttaaaatatggagtagcaaaattcttgaaattcagaaatgtagtgacacaaatattaatgtttagttaataaatagttaatgtagttttttgcttctgtctattattataaatatatacaaaataaatatttgaggataggtgttattaattatgaaaaagaattttattgggaaatcaattttaagcatagctgctattagtttaacggtatcaacatttgccggtgaatctcatgcacaaactaaggctgaaaaatataacgagtatcaaacaaactttaaaaaacaagtaaataaaaaagttgtggatgcacaaaaagctgtaaacttgttcaaacgtacaagaactgttgcaacacaccgtaaagcacaaagagctgttaacttaattcatttccaacacagctatgaaaagaaaaaattacaaagacaaatcgatctagttttaaaatataatactttaaaataattgatagaagccatgctatagagtgtggcttttttactatgtgtaatctgatgaaagttatttaaacattgtatgtattttacttgatgagtatattggggtaaatcttagaaaatcctttgaaaatgtatgtgataggtgttttgaatgacgggataacgccaagcatatgtattaacaatcgttagaattttcgcggatttagaggtattgtgttaatcatacgtgctttattaaacagtcgtaaagatgataaataaattgggagttgcagcatataaaaaagcacgccaaaacgttagcattgttttccaacgtttggcgtgcaactatttaattcagtgtgtttattgatcccaatagatcgagtcgatttcaccatttttaactaagggaatatttttcctgttttcttctaaaggacgagttaagtcaaaagtttagaaatctttaggtcctccatttctcattttaacgacagcttttttcacatcgcctttgcttaattttttgacaatgatgtataggtcattaacagtttcacctttaaaaccttcgtcaattaatttagtagcacgttcatcatcttttttagcttgatctgctaactttttagcgatttctaatcctttccattcataactaaagaaagctttagcatcatttgaatgagttagaagacctgtagcgatgactgtagatgcaataattacttttgtaatattttttttcataataagttctccctgtaaaatagatttgtacttactaatgcgagtacactgctattttacaaacggtttcaagcatttaccagttaacacttcattaattaaatttaagtgcaaattaataaggtttaatgcaattgaaaaagaatattgatgaatttgatgttattatttttatttgaggtattattgaatttattgatagtataataatattagtaaacgtcactcaactatgattgaatgatttttattgttaaaacgatatttatatttctctacatttaattgcaatgttgggtagacaagtagtccaaattgttatacatatagcgtttttgataattaatgtttataaaacatagaaatgacacatagtagagaagtaattaatatgtataattttacttataaagaaataagagatatattctaattaaggttgatatgttatgattaatatataagttaaaaaatatactatttagttgtattatgcattttcgaagtaagcataattcaacacttacatttttaaatagataaaatagtgtaaaatcacgtgccaagattactatagagtaggcattgagtattattggcaatcacttaagtgattgttattttttcgtggtcaataataaagatataaataaacatattgaggtcaaacgatgataattaaaattttaacaattctattactactttgtatattgagctatttggttacaaataaaaagaagccttttctgttcttaaagacactctttatgggtgtggtgtttatctttataggatatatttcactggcaatatctgccgtaattatttatggtattattcaatttatcacaattgattttggtagttttttcttaatgggtattattttgatcttgatttcaagtatattccaattatttatagttagattactttttagaaaaaagaatgtcgatttaacagaggttgtcgttttagaacatttaattcaatggttcttagtttattttgcgatctatcaagcagtaaatgaaaaaatggacattaatgatattaatatcgacaatttccaatcagtcttttttgacgtgtctaatttgaatttagtaattctaccaactttgattattagctgggttacaatatttaactatagaatgagaagttacaaataaaatctatgaaattataccatcagacaccaacattcaaatggtgtctttttgttgtgtagttttatttttgaaattcgaaaagtagaggcatgaaatttttgactagtgtataagtattgatgagacacaagatagataactatattttgtctatattataaagtgtttatagttaattaataactagttaatttcaaaagttgtataaataggataacttaataaatgtaagataataatttggaggataattaacatgaaaaataaattgatagcaaaatcattactagcgatagcggcaattggtattactacaactacaattgcgtcaactgcagatgcaagcgaaggatacggtccaagagaaaagaaaccagtgagtattaatcacaatatcgtagagtacaatgatggtacttttaaatatcaatctagaccaaaatttaatacaacacctaaatatattaagtttagacatgattataacatcgtggaatataatgacggtacattcgaatatggtgcacgtccacaatttaataaaccagcagcgaaaactgaggcaactattaaaaaagaacaaaaattgattcaagcccaaaatcttgtgagagaatttgaaaaaacacatactgtgagcgcacatagaaaagcacaaaaggcagtcaacttagtatcatttgaatacaatgttaagaaaatgatattgcaagagcgaattgatcaagtattaaagcaaggattagtgagataatacttctgtcattattataagttcaaaataatttaatattatattattttttattaataaaacgactatgttatttaatgccaggttaatgtaactttcctaaaattgactatataatcattaagtatcaattttaaaaggagaatttacaatgaaatttaaaaaatatatagtagcaggaacattagcagtactattatcaacaacagcagtatcaacgttagatgggaataaagcagatgcaagtagtaagaaagactatataattcaaagtgagtttcatgataaacgaattgctgaagaattgaaatcattacttgatcaatcttatgtaaatgatttagctgcaggaagcttaaacccatactacaaacgtatgattatgatgaaccaatatagagcaaaagcagcactaaaaagtaataatttcgcaaaaatggctgaagctaaagttggattagaaaacatttacaaagaaattgatgaaattataaatagataataaaaaacaggcagagacaaaaatagaattgtcttcgcctgtttttttatttgtacagttaaaaattctgcaatttaaaatttatgtatgagcaatgtatacaaaaaataggggagacaaatataaatataatagttagaaatattatgcacaaaattgctttgtacaatctaaaaaatatttatagtgctcccatagataaatttaaacgtagtatgaaacgttctgatttttactcaatgagtatattattggaagaaaaagttaacgtgtgtcgaacatgccacgatgccaaatataatgaatagaaataagacaataagcatggcggcgctttttaaacaacctctatttgtttcctccgaatttctttgttgaacctttttataatcttcaagatgctttgtggtctttttatttatatgtttattcatgatgtttactccttaatctaaatgtaaattgcattaaaatagttgaaaacataacttgaaataaagatataaagcttaagttaggctgctcgttgtttcaaattttaagtgagtatcatgttaaattagatgataacttgtttcgtttattttccaatttgtttgtttttaaactgacgtattaaaatattaatgaaacattagaatacataaatgaacagtaaaggtgcacagtatagaaggattaatgccacactaagtataaatattgttagctgtaaactatctttagttttaatataaacaattaatataagtagtgttaaaaggatcatatatattaatgacgaagaagtccaaacaaaatctgcgtcattggtagttagcaatgggacgataatcagtccgaagttaatcatgcatgctatatatacaatgatgttatacacaatgttaatttttggtcaccaccttaactgttgtttttaaatgctttgaaaaattgcattttaatagtgtaatgaatatccgaatttctaattttcgttcgttatacgtttaaaagactatatatagtatgcctttatgtttctaaatgttttttaatatttaattctcgtcaatatttggattatgaatcatcaacgcaagtactttgttagatgcgtcaattgtaaattcagagccatagttaacatgactaacttttaatttattatctaaataattgattgcgattgcgacatcataatcttcatcaataacaaataaactattttcgtttgtaactacttcatgtttccctgagtaaacaacattaatttcccaatctttaaaaaccatttgtcatcctccttgaacatttaaactgattcaatctaagtttaacttattcatacaacttcttacaatatctagattagagataaatagatttctagaaattattttcaattatatgtacttattatactttttatcttcttatttcagtatagttttaaaacgattttaaaataattctgcaaatatattaacacataatgtgttcaataagttttgaacaatttcaaaacttttaattaaagggtttgacaacaatgaatttcaaatgtttgtagttaagaaatcagtaccgtaatcatgattttagccgtgaatatatactgaaaagcataataggtatattactattcatgatgtttaattttatactgcaactaaaatagccgacgcacatcatttctgatgttatcggctaatattattatgtgactatttgagtgtacataaccattaatttgtcatttcttctttttcccaatcgattttatatctttctgaagaacgatctgtccatttatctttagtattggtacctttccaatttgttgaagtccaatgtagttgatagtcatcacgaactcgttcgtatattacatctatatttgtttgttgtttggttgctttcctatccatagtaataactgtagcaaagtctggtgagaatcctgaagataataaagaacttgctttgttagggtcaaggaagttctctgctgctttcattgaaccgtttcttgttttcatgaaaagttgattgccatatactgggttccaagaatctctgtcatatggtccccaattttgattcaccatattgttaaatataactttccaacctacttttttatcagttggactttctaaaattgttttgaaatctggttgaacatatttgagtgtatgaccaattgaaacatttgcaccaatcaaaccgccaatttttccagaatcatcaccagtcacgttaccgttgaatccataagttaatgtactcatatattctttagtatcaattgaatttctagggtagtaatcagaaatttgtgctacttcattatcaggtagttgcaactgtaccttaaatgctgaaggccaggctaaaccgcttttattagcgccttcttcgctataaactctatactgaccagcaatggtacctttcgttctgatgactaatatttttttattgtgatttttatcatcgataaaactataaaatacttttttgtgcatgccattttctttatcataagtgactaaatcacctgtttttactgtagtattgcttcctatatctgtagtaccggttttaatattaatatcagaatctgcggcattagcgacaggattcattaatatagaacctagcaatagtgttgttgttactgagctgactatacgtgttttcattttcatcatccttctattttttaaaacgatttgaggaaacaataatcaatatgtcaatttagaataatgcagttgagacatatcaaatatttatcatcgtttatattagtatatttaatgtagcaactgttaaatgattgagtgatgatgagtgaatattttaagaatatgtttttaacttttaattaatatttgaaaggaagcatttcaatgtcgaggcttagtcaaagttgaatgaactctttatgaaccaaggaaaagacaaagctaattttattgattaatttctttaaaactgggtatttatttaactttaaaatgtaatcgattacaatataaaaatacaaatatcttagaattaaatcaattaattaactattaaataaaagttaactgtatattaactagtataattaatcaattatgaatagagaaaaattaattgtcttggaatatttgtgcgaattaattttaacaaagtattgtaatttcgtataaaaatgtaaaagggtgtagtgtaatattataaaacattgtaaaatatgttatacaagggaaaatgtagacttctagttataggcgttataagagaatcttaaacttaggttagcttttaatgttgaaactaagtggaaagtgataaatataaaaatgataggggattataatgaaactattttatatcgcatttctaattattatatggctgaatatatttttaggaaatgaagtcattcatacactgactgttttaataacaacattgtatattgttaatagaagaaagagggttaaaaatgacagagttgaatgaaattatcaacgctattcaatctttgtttgagtctcaatcaggctacaaaatatcgaaaaattcaggggtgccgtatcagaccgtacaagatttgaggaatggtaaaacgaaaatagaagatgctagatttagaacaattataaaactatatagttattatacatcattaaaagagcagtcataattaaatcattaaataaagagtagagtctgggacataaatccctaaaaaaacagcagtaagataattttcaattagaaaatatcttactgctgttctctatttatacaatacttcgtattgaatggcttcgctttcctagggtgccgtctcagccttggtcttcgactggcactgctccctcaggagtctcgccattaatactacgtattaacatgtaattttactttgaaatactttaaaaaaataagacactttcgtataatttaataaataccactaaactaaattaacgaggtgccttatgtataaaaattataacatgacccaacttacactaccaatagaaacttctgttagaattcctcaaaatgatatttcacgatatgttaatgaaattgttgaaacgatacctgatagcgaattcgatgaattcagacatcatcgtggcgcaacatcctatcatccaaaaatgatgttaaaaattatcttatatgcatacactcaatctgtattttctggtcgtagaatagagaaattacttcatgacagtattcgaatgatgtggttagctcaaaatcaaacaccttcttataaaactattaatcgttttagagtaaatcctaatactgatgcattaattgaatctttatttattcagtttcatagtcaatgtttaaagcaaaatcttattgatgataattcaatttttattgatggtacaaaagtagaagctaatgccaataggtatacatttgtgtggaagaaaagtattcaaaatcacgaatcgaaattgaacgaaaattcaaaagcattatatcgtgacttagttgaagaaaaaataataccagagataaaagaagatggagatagcgatttaacaatagaagaaatagatttaattggtagtcatttagataaagaaatcgaagatttaaatcattctattcagaacgaagattgtactcaaattagaaaacagacccgtaaaaaaagaactgagattaagaagttcaaaaagaaatttgatgattattccgaaagaaaaagtaaatatgaagaacaaaaatcgattcttaaagatagaaatagcttttctaaaactgatcatgatgcaacttttatgagaatgaaggaagaccatatgaaaaatggccaacttaagccaggatacaatttacaaatagcgacaaattctcaatttgttttatcctatgacctatttcaaaacccgacagatactagaactttaattccatttttaacaatgattcaaaataccttcggttatttaccggagtatattgtagctgatgcaggttatggtagtgagcaaaactatatggctattatagatgattttaataaaacgccacttattacgtatggtatgtttattaaagataaaacgagaaagtttaaaagtgacatttttaacactcaaaactggaaatatgacgaacttaatgatgaatttatatgtcctaataacaaaagaataggttttaaaagatatgcataccgtaatgatagatatggttttaaacgtgacttcaaactatatgaatgcgatgactgttcagcatgttctttgaggcaacaatgcatgaagccaaattcgaaatccaataagaaaatcatgaagaattataattgggaatactttaaagcccaaattaatcaaaagctttctgaaccagaaacgaaaaaaatctatagtcaaagaaaaattgatgtagagcctgtttttggatttatgaaggctattttgggtttcactcgaatgtcagttcgaggaataaataaagttaaacgagagctaggttttgtattaatggcacttaatataaggaaaatagtagctcgacgagctgtatattatcaaatacatttaaaaaaaagctgatttctatcaaataattaatagaaatcagcttttttacattgcctaagaacttaatgtcccaagctctacaatattatatagacagacattgaccaaacaaaaatgcgattataacaagactttaaattagagacaggggccccaacaaaaagaatttcgaatagaaattctacagacaatgtaagttggggtggggccccaacatagagaaattgggttaccaatttctacaagcaatgcaagttggggcgggcccaaacccagagaatgacttggcatttctattagactccaaatcgcatttaatattctgtgtactaaattaatgattgtgtaagtactattgagacattttgtagtattactcaaatattgtttatccttagtatttacgatataaatcatacgaccttatttaatcaatgaggacttcgactgttattttttgaggatttttaacataaacatttgcaagatcagaatgtaatcttttactcaaatcaattgtaaagtcattgccgccaccggtgattttaagtttacctttattgcgattttcatgatataatattttatttttaattagtgtttcacgtgctcgaaaatcaatttctttcaatgttaatattggtttattaccttggtacatcttatgtgcaccaataattgtttgtagtttatctttgtattggacaaaaagactatatggtttatcagaaggtgatgcagcaggtgttacaccacctgtaaatgtatcacgatatacccaccataactggctagtgtcttcgtcttttaaaccaaacacgtctacatagcggtctcttaattgattaacgttgccccaactttcagcaccccataatcgtatatgcgctgaccaagaataacgcttaaattcaacataaatgttgccgtcatcatattggtataaccatctatttgaaaatgtgagaggcagttgtgtgtaatatttaattaactcattgatgttcgtttcgtcttggccaatatgataagctttagcgtctgtagaaacatttaatggcgaattagaggtttgtgtagctgttgttcctaataataacaatgttgtcattaaaattaactttttcataatgcactttctcattcgaacttctcctttctgcgtaatcatcaatacgagaattaacaaatttaaaaatgaacggcgtcaatgtaaacattgtgcttatttctgtttacttcgatttcgatgttagctagatttttcaaggaggatttcgatgtgtgcagtttgagggtttttaacatatctatttgcatcagttgattttaatcttttgcttaaatctattgtgtagttgttgctgccacctgtaatcttaatgtggcctttattataatcaccattatataattttttgtttttaattagtgtttggcggattcggaaatcaacttcctttaaagttaaaactggtttattacctgtataaaattgatattcgccaataaatgttcctgctttatctttatatgttacattcaatttataatgtttatcgctaggttttgctactggtgtaacaccgccagtaaatgtttcttgggctaacatataagtgcgccaggtttcataatcttttaaagcaaaaatatctacatatttatttcttaattgattaatattaccccaactttcagggccgaatacttgaatatgactaaaccatgataactgtaacaatgttgcatggattgtaccattatctttttgccatagccatttatttgaaaatgttaaatggcgttgtgtgtaatatttagtcaattcatttacattcgtttcgctttcacttatattgtatgcttttgcttcagatgacatactaatcggtgaatgaggggattgacttgtagctgtgcctatcatagtcaatgctattgataaaataattttttttgtgaggttgtttttcattagaaaatctcctttacgaggaatgttatatgcgaggaataataagtttataaaaagagagaaatcaattaaatcattcagtctatttgtattcactcaatgaatgatactaatgagatttttcaagaatgacttcaatttctgcatgtcgaggatttttaacataacggtttgtgtcagttagttttaactttttactcaaatcaatcgtataatgattaccaccacctgtaatcctaatttgacctttattaaattctccattatatagctttttgttcttaattaaagtttgacgtacgcggaaatctagttcttttaaagttattactggtttattaccttgataaaactcaagtccaccaatcatagtttgttgtttatccttatattttaaaaataatttataaggcttatcagatgaagtagctgctggtgttacacctccagtaaaggtttcatcataagtccaatagccttctatagtatcctcatccttggtaccaaaaatatctacatatttatctcttaattgattaatgttgccccaactttcaggaccaaatacttgaatatgcgtgtaccaaacccacgtttgtaatgttgcatgtatggtaccgttagggttttgccatagccattttccagaaaatgaaaggtgtggctgcgtgtaatatttgattaattcattgatattcgtttcgttttcacttatattgtatgcttttgcttcagatgaaaaactgattggtgctttaggcggttgtgttgatgtagttcctaaaagtaacaatgctgttgataaaacaattttgttcgtgatgttctttttcatatgataatctcctttgcgtgaattacccatagtatataaggtattgcaccgattcggaattaaataaaagctaacactatgttaaataaacataaacagttgaacgtgtgatttaagtaaaatttttcatttttaagcattggaacattgccaattataaaatgaaaagagtgctaataaattaaaactgatgctaattatgatattaattgcgttaaattagttatttattgaattttctaactacttgaaaaatagttatactttaaatgtagtacttattttaattatttcctactacttaaatttaatattaataaaatgttcatttaattattgataaaatattacaaattttaatagtaggttgtgtttattttgtatgcgcttacaatttaggtgtaactaaaataaaaggagttgttattaatgaaaaatttacgaaacagaagttttttaactttattagacttttcacgacaagaggtagaattcttattaacactctccgaggatttaaaacgtgctaaatatattggcactgaaaagcctatgttaaaaaataaaaatattgcactgttatttgaaaaagattctacaagaacgcgatgtgcatttgaagttgcagcgcatgatcaaggtgctaatgtaacttatttaggcccaactggatcacaaatgggtaaaaaagaaacaactaaagatactgcacgtgtgcttggtggaatgtatgatggcattgaataccgtggtttttcacaaagaacagtagaaactttagctgaatattcaggcgtaccagtgtggaatggtttaactgatgaagatcatcctactcaagttcttgctgatttcttaacagcaaaagaagttttgaaaaaagattatgcagatattaactttacatatgttggagatggacgtaataacgttgcaaatgcattaatgcaaggtgctgccattatgggtatgaacttccatttagtttgtccaaaagaattaaatccaacagatgaattattaaatcgctgtaaaaatattgccgctgaaaatggtggcaacgtattaatcacagatgatattgaccaaggtgtaaagggttcggatgtaatttacactgacgtttgggtatcaatgggtgaacctgatgaagtatggaaagaacgacttgaattattgaaaccttatcaagtaaataaagaaatgatggataaaactggtaatccaaatgttatttttgagcattgcttaccatctttccacaatgctgataccaaaattggacaacaaatttttgaaaaatatggtattcgagaaatggaagttacagatgaagtattcgaaagtaaagcttcagttgtattccaagaagctgagaacagaatgcatacaatcaaagcagtcatggttgctacattgggtgaattttaaatgatataaggaagtgaatatgatggcgaaaatagtagtagcattaggtgggaatgctttaggaaaatcacctcaagaacaactcaagcttgttaaaaatactgcgaaatcattagtaggattaataacaaaaggacatgagattgttattagtcatggtaatgggccacaggttggaagcattaatttgggacttaactatgctgcagaacacaaccaaggtccggcatttccatttgctgaatgtggcgcaatgagtcaagcttacatcggctatcaattacaagaaagcttacaaaacgaattgcattctattggaatggataaacaagtggtaacactagtgacacaagttgaagttgacgaaaatgatccggcatttaacaatccttcaaaaccaattgggttattttacaacaaagaagaagctgaacaaattcaaaaagaaaaaggatttacatttgttgaagatgctggaagagggtatagacgtgttgttccttcaccacaacccatctctattattgaattagagagtattaaaacacttattaaaaatgatacactcgttattgctgctggtggtggaggtataccagtaattagagagcaacatgatggttttaaaggtattgatgcagttatagacaaagataaaacaagtgcgttgttgggtgctaatattcaatgcgatcaattgattattttaactgcaattgattatgtatatattaattttaacactgaaaaccaacagcctttgaaaacaacaaatgttgatgaattaaaacgatatatagacgaaaatcaatttgcaaaaggaagtatgttaccaaaaattgaagcagccatatcatttattgaaaacaatccaaaaggaagtgtgcttataacatcattaaatgaattagatgctgccttagagggtaaagtaggtactgtgattaaaaagtaattgaattgaaacgcttttcaattactatatgtcaaatgcatgatttttattatttatgtgcacccctgaaaataatgcctctattttgatgcggggtgcactttcttaatttatatttataaaatctttaaggtagaaatgctaggttaaatgtcgaaggagatgaaaccgtggaaaatacaattaatgaaagtgaaaagaaaaaacgatttaaattaaaaatgccaggtgcatttatgattttattcattttaacggttgttgcagttatagcaacatgggttattcctgctggtgcatattctaaactttcttacgaaccttcatcccaagaactaaagatagttaaccctcataaccaagtgaaaaaggttccaggtacgcaacaggaactagacaaaatgggggttaaaattaagattgaacaatttaaatcaggtgcaattaataagccggtatcaattccgaatacttatgaaagattaaagcaacatccagctggaccagaacaaataacaagtagcatggttgaaggtacgatagaagcggttgatatcatggtattcattcttgtattagggggacttattggcgtagttcaagccagtggttcttttgaatcgggattgctagctttaacaaagaaaactaaagggcatgaatttatgctaattgtgtttgtatcaatactaatgattatcggcgggacgttatgtggtattgaagaagaagctgtcgcattctatccgattttagtccctatatttatagcgttaggatacgattctatcgtttctgttggtgccatattccttgccagctctgtcggtagtaccttttcaactattaacccgttctcggttgtaattgcctctaatgcagctggtacaactttcacggatggtttgtattggagaataggtgcttgtattgtcggtgcgatttttgttattagttatttatattggtactgtaaaaaaattaaaaaagatcctaaagcgtcatattcttatgaagacaaagatgcttttgaacagcaatggtctgtgttaaaagatgacgatagtgcccattttactttgcgtaagaagataatccttacattatttgtactaccatttccaattatggtatggggagttatgacgcaaggttggtggttcccagttatggcttcagcatttttaatatttacaattataataatgtttattgctgggacaggtaaatctggattgggagaaaaagggactgtagatgcatttgtcaatggtgcatcaagtttagtaggtgtatctttaattattggattagctcgaggtattaatttagtgttgaatgaaggtatgatttcagatacaatcttacacttttcatcatctttagttcaacatatgagtggaccattatttatcatcgtattactatttattttcttctgtttaggttttatcgtgccatcatcttctggattagcggtattatcaatgcctatctttgcaccactagctgatacagtaggtataccaaggttcgtcatcgttacgacatatcaatttggtcaatatgctatgttattcttagcgccgactggacttgttatggccacactacaaatgttaaacatgcgatattcacattggttccgatttgtatggccggtagttgcttttgtattgattttcggtggcggagtactaattacgcaagtactaatttattcataatttgaaatgctatattataaaaaatactaattgggttatatgcatctcgtaggtttgtagaaatactaaactaagcgaggtgcattattattttgatttagaaaataatggcggtaatgataacattagtaagtaattgatacaatgttctatttaataatgatatttttaaaatatgtttttaatgtaatgttagatctatggtatattatatttatcgtggtaaatatatatttgctgtaaacagtttttgtaacacatgatacatttggttgtgaaaatagcataaataaaggatggctataaatgacacatttgacaaaggttttagatacactaactggaatatgcgtagtattattatttagtaaatattttgtgacgtatgcaaatatggtatttgattggaatttaagatggtatttgctaggaaacataccacatttgccaattatattatttattctgatgtttattttcggagtaccttctgaaatgataaaagataggcagaggaaaaataacggcgtttaatttatcgatgttaagaggtgataaaacttgtcaactattacaaaaactaaaataaaaatctttattaattattttattggtatattagccttggcgtttgctgcttatatattatttaaataaagaatagagtgaaacgtgtttatgaactagacgttctagtatagttactacagctttagtcagaaggtatcattgttgttcataaataagatgatattaaatcaaagaggcattgatatacactaaaaagaggcaagattacctgccccttttttagttattaaatatgcgtgtaaattcttggtaatagtgttactgagacgcattacgaagaaatttatcttggttttccttttttaaaaagaagtgaagatatcctataaagactctaagtactattacagtggctaataacacttcgataaacaaaaggcccttccaaatgactggaaacataagcacaggcaaactgttctttaaagcagttgcagagattactaaagggaatgtgaaagctgaaaatactggcgaaaaaggttcttttagtaatttaggcaattgtataatgatgtaaaaataaaatatttgagctaatagtaaaagtataattacgataaaagcattcgctttaggaaaggctataacatatgctgcagcgactaaagaaaatggtgcacaaattgtcgatgtgttcggtttgattgacgtctgcaatggaaatgcttttaatcgcttgaaaactataggtaagacaatacaagtagctacaaagccatatattactgttaattgacctatgaaaaaatatccgctgacgggtgccgtcaatcctgcgatagcaataccaataaaaagtacagtccatgaaggataaacattctcaagtgaaaaatcttttaaatatttaattgaaaaaataatcatatgcatcataattcccacaaggcataaaatccaaataggcgttattaaattattgataaatgttatattactaaaaaatgtatttaaataagtagtacctaaaaagccagacatgaaaaatgttgtgaacacagatgaaactagagggctgtttaattgttctttcacattattaaaatatttgagcatagtacataaaaggtgaatccaaatcaagaaagcaaagattccgcaaatagcgtttaaagtaagagataagtcttttaatagattacccaggcctaataatcctaagactagtcctgacgttactagaggtgctttttgaagtctcatgatttacaacctttcttatgtgattttcttcactaattatatcatgattgctatggactattaataagaagagagtgtactattacgtttttagagtgtgtatattggattgatagacacataattgacatttaaatctcaaaattaatgatatttgaggtatgctttgctacctaaatatggaatgtgggaaaagtatttatttaatttaaatgatgattgaagatttacaagggagtgtacaaaatgagaaatcaaattcaaaaactattagacagtgatttgagcagtttacatatatcaaaacaaacaggagtgccacaaagcacaatacacagaatgagaaaaaatgaaagatcattagacaatatgtcattgaaaaacgctgaactactttataaatttgccaatggtatatttagtgatgaaaattatgaagaataattagtgagttaaataattagaaaaccacgtctcgatggacgtggttatttttcagatgtatataattataattataggatttcgggtccctgaaaagtccctaaaattttgaatagtatcaaaatctataggaataatataataataaaaatctctacgcatgcaaatggtgagtgttaaaaatcttggtgtagttttggtgtagttcaggtacagtatagaggaaatttgagcgcaaaattacttaattaaaaatgtgtaaacaagtgtcagacgcgtgtcaattgtgtgtcaaaaaattctataacgaatatgcatgcttgtttttatcactgtattttctgggcttgtgcggggacgttttggtgacgcatcatactatattactgaaattcaaaacaaaaagagccccgtaatcacggaactcttttgtttggtaatgcgtataaaaatactataaacgtcctgggagggattcgaacccccgaccgatggcttagaaggccattgctctatccagctgagctaccaggacacgtttaacaacacaagaattattatatctaaatgaacttaaattagcaataccttgtaaataaaaaatgtttatatttttcactattatagagctatttatctaaaaaggttcaataagacttaaatacgaattcaggcaacttaattgtgttaaatacagttttgaatgcctaactgtatatcttttctctttaaagtacagttaagtacattataagatgttgtgcggataaacaaactaattgcatcaaatttattttaaaataacaacaacaaaacgttgagcgaataacatttcggtgatttaaaagctacgcacgtttttgttatcttcaaatttaaattttaaggagtgttttcaatggaaggtttatttaacgcaattaaagataccgtaactgcagcaattaataatgacggcgcaaaattaggcacaagcattgtgagcatcgttgaaaatggcgtaggtttactaggtaaattattcggattctaatataataactaatattctttaaaataaactgggtgagcatactttaatgttatgcactcagtttattttatttgcagaaatttgagcctctgttaagatttagatacatagacaatataggagatggggaaattgggatataaaaatattttgatagactttgatgatacaattgttgatttttatgatgcagaagaatgggcattttactatatggcgaatgtttttaatcataaagcaacaaaggatgattttttaacatttaaaaaaatcaatcaccaacattgggaagcttttcaacaaaataaattaacgaagtctgaagtatcatcagaacgatttgtaaattacttcaaacatcatcaaatggaagttgatgggcatcgtgcagatgtgttatttagaaatggattagcagaagctaaagttaaatactttgatcaaacattagaaacaattgtcgagttatcgaaaagacataatctatatattgttactaatggtgtaacagaaacgcaaaagagaaggttaaatcagacgccattgcataaatatattaaaaagatatttatatctgaggaaacaggatatcaaaaacctaatccggaattttttaattatgtttttaatgatattggtgaggatgaaagacagcactcgattatagttggagattctttaacatctgacattctaggtggaatcaatgcgggtatagctacttgctggtttaattttagaggatttgatcataatccaggaattatacctgattatgaaattaattcatggaaacaactaaatgaaattgtacgttaagacaaataatttgaaaatgatttacttatattagctaagaaagtaattgtaaaaaagacactacgaaaagatgcattttcattctcgtagtgtcgaatattattatcttatggtttccacaataagacatcatgtccctctatatttttagcttccacatctgtaaatccatgatgtaaaaagaaatccttagaatcatttctgccaatggctttaattggcatattgaaactctttgcaaaatcaatcaattctgaagcgtaccctctgttttgatattttggtaatacttctaacttccataataatatataatcttcaaaatctgggaagtagatttcttcgacatcaccttttttaagtaatgccattctagctcctaattgatctccgacaaatatgccataaaatggtgaatctgaacttgcgtcaatcatttgaccgtttaactcattgaccatgtataagtctttgttgccaaacgctctaaagttttcgaataattcgtcagttttgtaattaatttcaagacgtttgatttcactcatatttatctaccccttatttgtttactactattattatacattaaaccacttgtgtttttcattgatttgaaaatgtaaaacaatgaatattataaattttccatgattaaattgattttcaagccgtaaaattgtcaatcaccggtatagactttatactatagtttgtaatcgcgtacttaaggagaaaaaacatggactgtaaagtagttagtttaaatgaaaaagatcagtttataccaaaaataaagagcagtgatcctgtaataacaggattatttcaatatgatgcagctcaacaaattagttttgaaaaaagaatgtctaaagaaaataatggaagagaagcggcattagcgaatgttattcgtgaatatatgaatgatttaaagctttctagtgaacaagaattaaacatacaacatttagctaatggttcaaaagttgtgattggtggacaacaagcagggcttttcgggggaccattgtatacattccataaaatattttcaatcattaccttatctaaggaattaacggatacacataagcaacaagtagtaccagttttttggattgcaggagaagatcatgatttcgatgaagtgaatcatacatttgtttataacgaaaatcatgggtcactgcataaggttaaatatcatacaatggagatgccagagacgactgtctctagatattatcctgataaggctgagttgaaacaaactttaaaaacgatgttcattcatatgaaagaaactgttcatacacaaggtctacttgagatttgtgacagaattattgaccaatatgactcgtggactgatatgtttaaagcactactgcatgaaacatttaaagcatatggcgttctatttatagatgcgcagtttgagccgttaagaaaaatggaagcgcctatgtttaaaaagattttgaaaaaacatcagttgcttgatgatgcttttagagcaacacaaaaacgtactcaaaatcaaggcttgaaggcgatgatacaaacagatacaaatgttcatttattcttacatgatgaaaatatgcgtcaattagtttcgtatgatggtaagcattttagattaaataaaacagataagaaatatataaaggaagaaattattaatattgcggaaaatcaacctgaattattttctaataatgtagtgacaagaccattaatggaagaatggctatttaacacggtggcatttattggagggccgagtgaaattaagtactgggctgaactaaaagatgtatttgaactatttgatgttgaaatgcctatcgtgatgccaaggcttagaattacttatttaaatgaccgtattgaaaaattactttcgaaatacaatattccattagaaaaagtgttagtcgatggtgttgaaggagaaagaagtaagtttattagagaacaagcatcagatcaatttattgaaaaggtagaaggtatgatagaacaacagcgtcgtctataccaagacttattagatgaagtggcggggaatcaaaataatattaaccttgtgaataaaaataatgaaattcatatacaacagtatgattatttgttaaaacgttatcttttaaacattgaaagagaaaacgacatcagtatgaagcaatttagagaaattcaagaaacactccatccaatgggaggattacaagaaagaatatggaatccacttcaaattttgaatgattttgggacagatgtgttcaagccctccacctatccaccactttcttacacttttgatcatattattataaaaccttaatataccaagggtttagcccgatttatcataatgataaatcgggcatttttttgttttttaaaataaatttcacaaattttgtataaatagtggtggatagtggggagatgtggtaaattatatataaggtgaggtgataaaaaatgttcatgggagaatacgatcatcaattagatacaaaaggacgtatgattataccgtccaagtttcgttatgacttaaatgagcgttttattatcacaagaggccttgataaatgtttattcggttacactctagacgaatggcaacagattgaagagaaaatgaaaaccttacctatgacaaaaaaagacgcacgtaagtttatgcgtatgttcttctctggtgctgttgaagtagaacttgataagcaagggcgtattaacatccctcaaaacttgaggaaatacgctaatttaactaaagaatgtacagtaatcggtgtttcaaatcgtattgagatttgggatagagaaacttggaatgatttctatgaagaatctgaagaaagtttcgaagatattgctgaagatttaatagattttgatttttaaaatggaggaattgaagtgtttcatcatatcagcgttatgttaaacgaaaccattgattatttaaatgtaaaagaaaatggtgtgtacattgactgtacgctaggtggagcgggacatgccctttatttactaaatcaattaaatgacgacggaagattaatagcaatcgatcaagaccaaactgcaattgataatgctaaagaggtattaaaggatcatttgcataaggtgacttttgttcatagcaacttccgtgaattaactcaaatattaaaagacttaaacattgaaaaagtagatggaatctattacgacttgggtgtttcaagcccacaactcgacattccagaacgaggattcagttatcaccatgacgcaacattagacatgcgtatggaccaaacacaagaactaacagcatatgaaattgttaacaattggtcatatgaagcgttagtgaagattttttatcgctatggcgaggagaaattttcaaaacagatagctcgaagaatcgaagcacatcgcgaacaacaaccaataacaacaacattagaattagttgacattataaaagaaggtattcctgcaaaagcaagaagaaaaggcggacatcctgcaaaacgagtatttcaagcactacgaattgcagtaaacgatgaattgtcagcttttgaagattcaatagaacaagcgattgaattagtgaaagtagacggcaggatttcggtaatcactttccattctttagaagatcgtttatgtaaacaggtgttccaagaatatgaaaaaggtccagaggtaccaagaggattaccagttataccagaagcatatacacctaagttaaagcgtgttaatcgtaaaccgattaccgctacagaagaagatttagatgacaataacagagcacgaagcgcgaaattacgtgtagctgaaatacttaaataaggagcaattaataatggctgtagaaaaagtgtaccaaccatatgacgaacaagtttataatagtataccgaagcaacaaccacaaactaagcccgaaaagaagactgtttcgagaaaagtggttgtacaattaactaaatttgaaaaagttttatacataactttgattactgtaattgctatgttaagtatttatatgctatctttaaaaatggatgcgtatgatacgcgaggaaagattgcagatttagattataaaatagataaacaatcaagtgaaaacagtgctttacaatctgaaatcaaaaagaattcttcttatgaacgcatatacgaaaaggctaagaaacaggggatgagccttgagaacgataatgtaaaggtagtgcgtagtaatggcgaagcaaaaaattaaaattaaaaaaaaataaaataggggcagtcctacttgttggtttattcggactgctcttttttatattggttttaagaatttcatatatcatgattactggacattctaatggtcaagatttagtcatgaaggcaaatgagaagtatttagttaagaatgcacaacaaccagaacgaggaaagatatatgatcgtaatggtaaagtgctagcagaagatgtagaaagatataaacttgttgcagtaatagataaaaaggcgagtgccaattctaaaaaacctaggcatgtagttgataaaaaagagactgcaaagaaattatctacagtcattgatatgaagccagaggaaattgaaaagagacttagtcaaaagaaagccttccaaattgaatttggacgcaaaggaacaaatttaacgtatcaggacaaattgaaaatagagaaaatgaatttgcctggtatttctttattgcctgaaacagaacgattttatccaaatggcaattttgcatcacacttaattggtagagctcagaaaaatccggatactggtgaacttaaaggtgcgcttggagttgaaaagatttttgatagttatttaagtggatctaaaggatctttgagatatattcatgatatttggggatatattgcaccaaatactaaaaaagagaagcagcctaaacgtggtgatgatgtccatttaacaatcgattcaaatattcaagtatttgttgaagaggctttagatggcatggttgaaagataccagccgaaagatttatttgcggttgtcatggatgccaaaactggagaaattttagcatacagtcagcgaccaacatttaatcctgaaactggtaaagattttggtaaaaagtgggcaaatgatctatatcaaaacacatatgagcctggatcaacatttaaatcatatgggttagcagctgctattcaagaaggtgcttttgatcctgataagaaatataaatctggacatagagatattatgggttcacgtatttcagactggaatagagtcggttggggtgaaatcccaatgtcactcggatttacttattcatctaatacattgatgatgcatttacaagatttagttggtgcagacaaaatgaaatcttggtatgaacgatttggatttggaaaatcaactaaaggtatgtttgatggagaagcacctggtcaaattggatggagtaatgagttacaacaaaaaacgtcatcatttggtcaatcgacaactgtaacacctgttcaaatgttacaggcgcaatcagcgttctttaatgatggtaatatgttaaaaccatggtttgtgaatagcgttgaaaatcctgttagtaaaagacaattttataaaggtcaaaaacaaatcgcaggcaaaccaataacaaaagatactgctgaaaaagttgaaaagcaattggatttagttgtgaatagtaagaagagtcacgctgcaaactatcgtattgatggttatgaggtcgaaggtaagactggtacagcacaagtcgctgcacctaatggtggtggatacgttaaaggtccaaacccatatttcgtaagttttatgggtgacgcaccgaagaaaaatcctaaagttattgtatacgctggtatgagcttggcacaaaaaaatgaccaagaagcttatgaattaggtgttagtaaagcgtttaaaccaataatggaaaatactttgaaatatttaaatgtaggtaaatcaaaagatgacacatctaatgcagagtatagtaaagtgccagatgttgaaggtcaagacaaacaaaaagctattgataatgtgagtgcaaaatcattagaaccagttactatcggttctggcacacaaataaaagcgcaatctataaaagcagggaataaagtcttacctcatagtaaagtactgttattaacagatggagacttaactatgcctgacatgtcaggatggacgaaagaagatgtcattgcttttgaaaacctaacaaatattaaagtgaatttaaaaggtagcggttttgtgtcccaccaatcaattagtaagggacaaaaacttactgaaaaagataaaatagacgtagaattttcatcagagaatgtagacagcaattcgacgaataattctgattcaaattcagatgataagaagaaatctgacagtaaaactgacaaagataagtcggactaacaagaatggctacattaaataagggtgtattgtcactatttgtttttactaaagtaatgctgtgatagaaaacaacatcttcatttaatctttataaataagtgttgatagagaattttaaggtagacgaggtcagattaacttgtttgttataggcaaactttttatactggcctcttatgccgtaaaaaagaaaaattataaattttgattacaactttgtttatttaattgaaaaattgataatatattagtggttaaaaaagtctggattaagaagaggagatagttatgatttttgtatatgcgttattagcgctagtgattacatttgttttggtacctgttttaatacctacattaaaaaaattgaaatttggtcaaagtattcgagaagaaggcccacaaagccatatgaagaagactggtacaccaacgatgggtggactaacatttctattaagtattgtgataacgtctttggtggctattatatttgtagatcaagctaatccaatcatactgttattatttgtgacgattggttttgggttaattggttttatagatgattatattattgttgttaaaaagaataaccaaggtttaacaagtaaacagaagtttttggcgcaaattggtattgcgattattttctttgttttaagtaatgtatttcatttggtgaatttttctacgagcatacatattccatttacgaatgtagcaatcccactatcatttgcatatgttattttcattgttttttggcaagtaggtttttctaatgcggtaaatttaacagatggtttagatggattagcaactggactgtcaattatcggatttacaatgtatgccatcatgagctttgtgttaggagaaacggcgattggtattttctgtatcattatgttgtttgcacttttaggatttttaccatataacattaaccctgctaaagtgtttatgggagatacaggtagcttagctttaggtggtatatttgctacgatttcaatcatgcttaatcaggaattatcattaatttttataggtttagtattcgtaattgaaacattatctgttatgttacaagtcgctagctttaaattgactggaaagcgtatatttaaaatgagtccgattcatcatcattttgaattgataggttggagtgaatggaaagtagttacagtattttgggctgttggtctgatttcaggtttaatcggtttatggattggagtgcattaagatgcttaattacacagggttagaaaataaaaatgtattagtcgtcggtttggcaaaaagtggttatgaagcagctaaattattaagtaaattaggtgcgaatgtgactgtcaatgatgggaaagacttatcacaagatgctcatgcaaaagatttagaatctatgggcatttctgttgtaagtggaagtcatccattaacattacttgataaaaatccaataattgttaaaaatcctggaataccatatacagtatctattattgatgaagcagtgaaacgaggtttgaaaattttaacagaagttgagttaagttatctaatctctgaagcaccaatcatagctgtaacaggtacaaatggtaaaacgacagttacttctctaattggagatatgtttaaaaaaagtcgcttaactggaagattatccggcaatattggttatgttgcatctaaagtagcacaagaagtaaagcctacagattatttagttacagagttgtcgtcattccagttacttggaatcgaaaagtataaaccacacattgctataattactaacatttattcagcgcatctagattaccatgaaaatttagaaaactatcaaaatgctaaaaagcaaatatataaaaatcaaacggaagaagattatttgatttgtaattatcatcaaagacaagtgatagagtcggaagaattaaaagctaagacattgtatttctcaacacaacaagaagttgatggtatttatattaaagatggttttatcgtttataaaggtgttcgtattattaacactgaagatttagtattgcctggtgaacataatttagaaaatatattagcagctgtgcttgcttgtattttagctggtgtacctattaaagcaattattgatagtttaactacattttcaggaatagagcatagattgcaatatgttggtactaatagaactaataaatattataatgattccaaagcaacaaacacgctagcaacacagtttgccttaaattcatttaatcaaccaatcatttggttatgtggtggtttggatcgagggaatgaatttgacgaactcattccttatatggaaaatgttcgcgcgatggttgtattcggacaaacgaaagctaagtttgctaaactaggtaatagtcaagggaaatcggtcattgaagcgaacaatgtcgaagacgctgttgataaagtacaagatattatagaacccaatgatgttgtattattgtcacctgcttgtgcaagttgggatcaatatagtacttttgaagagcgtggagagaaatttattgaaagattccgtgcccatttaccatcttattaaagggtgtgagtattgatggatgataaaacgaagaacgatcaacaagaatcaaatgaagataaagatgaattagaattatttacgaggaatacatctaagaaaagacggcaaagaaaaagatcaaaggctacacatttttctaatcaaaataaagatgatacatctcaacaagctgattttgatgaagaaatttacttgataaataaagacttcaaaaaagaacaaggcaatgaagaaaataatgattctgcttctagtcatgcgaatgataataatatcgatgattctacagactctaatattgaaaatgaggattatagatataatcaagaaactgacgaccaaaatgaatcgaatggaattgcagtcgacaacgaacaacatcaatcagctccaaatgaacaaaatagcgactcgaatgatgaggaaacagtaacgaaaaaagaacgaaaaagtaaagtaacacaattaaaaccattaacacttgaagaaaagcggaaggtaagacgtaaacgacaaaaacgaatccaatacagtgttattacaatattggtattgttgattgctgttatattaatttacatgttttcaccacttagtaaaattgcgcatgtaaatataaatggaaataatcacgttagtacttcaaagataaacaaagttttaggtgttaaaaatgattcgaggatgtatacgtttagtaaaaaaaatgctattaatgatctcgaagaggatccattaatcaaaagtgttgagatacacaagcaattaccaaacacattaaacgtagatatcacagaaaatgaaattattgctttagtgaaatataaaggtaaatatttacctttattagaaaatggtaaattgcttaaaggttcaaatgatgtcaaaattaatgatgcacctgtcatggatggtttcaaaggtacaaaagaagatgatatgattaaggcgttatctgaaatgacacctgaagttagacgatatattgccgaagtgacatacgccccaagtaaaaacaaacaaagcagaattgaattgtttacgacggatggacttcaagtaatcggtgatatttcgacgatatctaagaaaatgaaatattatccgcagatgtcacaatcattatcaagagatagttcgggtaaactaaaaacacgaggctatattgatttatcagtcggtgcttcatttatcccataccgtggaaacacgtctactcaatcagaaagcgataaaaatgtgactaaatcatctcaagaggaaaatcaagcaaaagaagaattacaaagcgttttaaacaagattaacaaacaatcaagtaagaataattaaaaaattttgatattgtctatgtttatagttcacaagccattcaacgtattgtaaactaaggatagtgtatttttttaatagtaatttgtcaggaggtgcctatctatggaagaacattactacgtaagtattgatattggatcatcaagcgtaaaaacaatagtaggcgagaaatttcacaatggtataaatgtgataggtacaggacaaacctacacgagcggtataaaaaatggtttaattgatgattttgatattgcgcgacaagcaatcaaagacacaattaaaaaggcatcaatcgcttcgggtgttgatattaaagaagttttcctgaaattacctatcattggaacggaagtttatgatgaatcaaatgaaatcgacttttatgaggatacagaaatcaacggttcacatatcgaaaaagtattagaaggtattagagaaaaaaatgatgtgcaagaaacagaagtaattaatgtattcccaattcgttttatagtcgataaagaaaatgaggtttcagaccctaaagaattaattgccagacattcattaaaggttgaagcaggcgtaattgctattcaaaaatcgattttaattaatatgattaaatgcgttgaagcatgtggtgttgatgtattagatgtttattctgatgcgtataactatggttcaatcctaacagctactgaaaaagagttaggtgcatgtgtcattgatattggtgaagacgttacgcaagttgctttttatgaacgcggtgaattagtagatgctgattctatcgaaatggcagggcgtgatattacagacgatattgcacaaggattaaacacttcttatgaaactgctgaaaaagttaaacaccaatacggtcatgcattctatgattctgcttcagatcaagatatcttcactgttgaacaggttgatagtgatgaaacagtacagtatactcaaaaagatttgagtgactttattgaagcgcgtgtagaagaaatattcttcgaagtatttgatgttttacaagatttaggattaacaaaagtaaatggtgggtttattgtaactggtggatctgcaaacttacttggcgtaaaagaattattatcagatatggtaagtgaaaaagttagaattcacacgccatcacaaatgggaattagaaaacctgaattttcttcagcaatttctacaatttctagtagtatcgcttttgatgagttattagattatgttacaattaattatcatgataatgaagaaactgaagaagatgttattgatgtgaaagacaaagataacgaatctaaattaggcggatttgattggtttaaacgtaaaacaaacaaaaaagatactcatgaaaatgaagtagagtcatcagatgaagaaatttatcaatcagaagataatcatcaggaacataaacagaatcatgaacatgttcaagacaaagataaagaagaaagtaaattcaaaaaactaatgaaatctctatttgaatgattattggccaataaaactaggaggaaatttaaatgttagaatttgaacaaggatttaatcatttagcgactttaaaggtcattggtgtaggtggtggcggtaacaacgccgtaaaccgaatgattgaccatggaatgaataatgttgaatttatcgctatcaacacagacggtcaagctttaaacttatctaaagctgaatctaaaatccaaatcggtgaaaaattaacacgaggtttaggagcaggagctaaccctgaaatcggtaaaaaagctgcagaggaatctcgtgaacaaattgaagatgcaatccaaggtgcagacatggtatttgttacttctggtatgggtggcggaactggtactggtgcagcaccagtcgttgctaaaattgcaaaagaaatgggcgcattaactgttggtgttgtaactcgtccatttagttttgaaggacgtaaacgtcaaactcaagctgctgctggagtagaagctatgaaagctgcagtagatacattaatcgttataccaaatgaccgtttattagatatcgttgacaaatctacgccaatgatggaagcatttaaagaagctgataacgtgttacgccaaggtgtacaaggtatctcagacttaatcgctgtttctggtgaagtaaacttagactttgcagacgttaagacaattatgtctaaccaaggttctgcattaatgggtattggtgtttcttctggtgaaaatagagcggtagaagctgctaaaaaagcaatctcttctccattacttgaaacatctatcgttggtgcacaaggtgtgcttatgaatattactggtggcgagtcattgtcattatttgaagcacaagaggctgctgatattgtccaagatgctgcagatgaagacgttaatatgattttcggtacagttattaatcctgaattacaagatgagattgttgtaacagttattgcaactggttttgatgacaaaccaacatcacatggtcgtaaatctggtagcactggattcggaacaagcgtaaatacttctagcaatgcaacttctaaagatgaatcattcacttcaaattcatcaaatgcacaagcaactgatagtgtaagtgaaagaacacatacaactaaagaagatgatattcctagcttcattagaaatagagaagaaagacgttcaagaagaacaagacgttaatcggttaatatatacacaaataattcaacacaaatcatcagataacatatctgatgatttttttactaatttttagaacatgtagaaggacatttaagtttttcgaagtcattaaaagtgtttaagtatcgtgtcaaaattaagtcgaaaattatttgcgcaacattttaactttaaacataaatgttatattatataattattaactttgtacagttagacgaagataatttaaatgaaatgatggtgacgatcgagtgaatgataattttaaaaagcaaccgcatcatttaatatatgaagaattattacaacaaggtattactctaggtattacaactagaggcgatggtttaagtgactatcctaaaaatgcttttaatatggcgagatatattgatgattgcccatataatattactcaacatcaattgcaattagctgaagaaattgcgtttgatagaaaaaattgggtgtttcccatccaaacacatgaaaataaagtcgcttgtattaccaaggatgatataggcacaaatatagacactttaactgatgcgcttcatggtattgatgcgatgtacacatatgatagtaatgtcttattaacgatgtgttatgcagactgtgtaccagtatatttttatagtacaaaacatcattttattgcattggcccatgcagggtggcgtggtacctatactgaaattgtaaaagaagtgctaaaacatgtgaactttgatttgaaagacttacatgtcgttattggaccatctacatcatcaagttatgaaattaatgatgatattaaaaataaatttgaaacattgccaattgatagtgccaactatattgaaactagaggacgagatcgtcatggtattgatttgaaaaaagccaatgctgcattattaaataattatggtgttcctaaagaaaatatttatacgacagcgtatgctacatctgaacatttagagttatttttctcttatcgattagaaaaaggtcaaacaggacgcatgttagcattcattggtcaacagtaaacaaggaggagatatgtttgcgtgtgaaagataatttacaacaaatctcaacacaaattaatgacaaaagtgaaaaaaataatttttcaacaaaaccaaacgtgattgcagttacaaaatatgttacaatagagcgagctaaagaagcgtatgaggctggaataagacattttggtgagaatagattggaaggcttttttcaaaagaaagaagcattaccatcagatgcggtgatccattttataggatcattacaatctcgaaaagttaaggacgttataaacgacgtagattatttccatgctttagatcgattgagcttagccaaagaaattaacaaacgtgcagaacataaaattaaatgtttcttgcaagtgaacgtttcgggagaagcttctaaacatggtattgctttagaagatgttgatcagtttatagatgatcttaaaaaatatgacaaaatcgaaattgtaggtttaatgacgatggcaccattgacagatgatgaagcatatattagatcgttatttaaacagttacgtttgaaaaaagaagaaatacaacgactcaatttagaatatgcgccttgtgatgaattatcaatgggaatgagtaatgactatcttattgcagttgaagaaggtgcaacgtttgttagaattgggactaaacttgtaggagaagaggagtgagccacttggctttaaaagatttatttagtggattttttgtaatagatgatgaagaggaagtagaagtacctgacaaacaacaacaggtaaatgaagcgccagcaaaagagcagtcacaacaaacaacaaaacaaaacgcaatcaaatcagtccctcaaaaatctgcatcaagatatacaacaacgtcagaagaaaggaataaccgtatgtctaattattcaaaaaataattcacgtaatgttgtaactatgaacaatgctacaccaaacaatgcatcacaagaaagttcaaaaatgtgtttattcgaaccacgtgttttttcagatacacaagatattgctgatgagcttaaaaaccgccgtgcgacacttgtcaatttacaacgtattgataaagtatcagcgaaaagaattattgattttttaagcggtactgtttatgcaatcggtggagatatccaacgtgtaggtactgatattttcttatgtacgcctgataatgtggaagtagctggaagcattacagaccatattgaaaatatggaacattcattcgactaaggagttaacatatggatataaatgtgctagctacaatttttaaatttatcctttttgttgttgaaatttattatttcggcatgattatatatttctttacatcttgggtaccaagtattagagaaactaaggtaggttattttttagcgaaaatatatgaacctttcttacaaccatttagaaaagtaattccacctattggaattatcgacatatcatcaatcgctgcaattatcgttttagtattattccaaaaagggttactccaaatctttaattggattttaattcaattacaataaattaagcgacataacgaggcaagggtacatgatactttagcctcgtttttgatatgtatttttctaaatataagggcaatagatggtattttataatttttttaaggtagtgattaacatagatatttatcaacactttagacaggaagaatacgaattaattgatcagctaacggataaatgtgatcaagcggaacagcattatgcaccagtattaacgcattttttagatccaagagggcaatatatattggaagtgatttgtggcagttatgaagatttaaacgtatctttttatggcgggcctaatgctgaaagaaaaagagcaatcatttcgccgaactattacgaacctaaagaaagtgactttgatttaactttaatggaaatagattatcctgaaaaattcgtcactttaaaacatcaacatattttagggacattaatgtctttaggtatcgaacgcgaacaagttggagatataattgtgaatgaacgaattcaatttgttttgacaagtagattggaatcatttattatgttagaattacaacgtattaaaggcgcatcagttaaactttatactattccagtaacagatatgatacaatctaatgagaattggaaaattgaaagtgcaacagttagttctttaaggttagatgttgttattaaagaaatgatacgtaaatcacgtacgattgcgaaacaactaatcgaaaaaaacgtgttaaagtgaatcacactattgttgattcagcagattttcaattacaagcaaatgatttaatatccatccaaggttttggtagagcacacattactgacttaggtggtaaaactaaaaaagataaaacgcacattacctatagaacattattcaaatagtaatgatttaaggaggataacaaatgccttttacaccaaatgaaattaagaataaagagttttcacgtgtaaagaatggtttagaacctactgaagttgctaattttttggagcaactaagcactgaaattgaacgtcttaaagaagataaaaaacaacttgaaaaagtaatcgaagagagagatactaatattaagtcttatcaagacgtgcatcaatctgtaagtgatgctttgatacaagctcaaaaagctggtgaagaaactaagcaagctgcagagaaacaagctgaagcgattatagctaaggcagaagcacaagctaatcaaatggttggtgacgcggtagaaaaagcacgccgtttagcattccagactgaagatatgaaacgtcaatcaaaagtatttagatcgcgtttccgtatgttagttgaagcgcaattagacttattaaaaaacgaagattgggattacttgttgaattatgatttagacgctgaacaagtgacgcttgaaaatattcatcatttgcatgaaaatgatttaaagccagatgaagttgcagcaaatgcacaaaataatgcatcaaatacatcagacaataatcaacaatccaatgattcagaaacaactaagaagtaagaattaaataaagacagacgcgtaatatacatttaacttttcacagcgaattaggtaatggtgagagcctagtaaaagcatgtatgttatatcactggctttttaatatttaaataatgtaatgagagaactctaagttgagttaataagggtggtaccgcgagcaatcgtcccttttaatttaacttagagttttttaaatttttaaggagtgaaaaaaatggattacaaagaaacgttattaatgcctaaaacagatttcccaatgcgaggtggtttaccaaacaaggaaccgcaaattcaagaaaaatgggatgcagaagatcaataccataaagcgttagaaaaaaataaaggtaacgaaacattcattttacatgatggcccaccatacgcgaatggtaacttacatatgggacatgccttgaacaaaattttaaaagactttattgtacgttataaaactatgcaagggttctatgcaccatacgtaccaggttgggatacacatggtttgccaattgaacaagcattaacgaaaaaaggtgttgaccgtaagaaaatgtcaacagctgaattccgtgagaaatgtaaagaatttgctttagaacaaattgaattacagaaaaaagattttagacgtttaggtgttcgtggtgactttaatgatccatatattacattaaaacctgaatacgaagctgcacaaattcgtatttttggagaaatggcagataaaggtttaatttataaaggtaaaaagccagtttattggtctccttcaagtgagtcttcattagcagaagcagaaattgaatatcacgataaacgttcagcatcaatttacgttgcatttaacgttaaagatgacaaaggtgtcgttgatgcagatgctaaatttattatctggacaacaacgccatggacaattccatcaaatgttgcgattaccgttcatccagaattaaaatacggtcaatacaatgtaaatggcgaaaaatatattattgcagaagccttatctgacgccgtagcagaagcactggattgggataaagcatcaatcaaattagaaaaagaatacacaggtaaggaattggagtatgttgtagcacaacatccattcttagatagagaatcgttagtgattaatggtgatcatgttactacagatgctggtacaggttgtgtacatacagcaccaggtcacggggaagatgactatattgttggtcaaaaatatgaattgccagtaattagtccaatcgatgataaaggtgtatttactgaagaaggcggccaatttgaaggaatgttctatgataaagctaataaagccgttactgatttattaacagaaaaaggtgcactattaaaattagactttattacacatagctatccacacgactggagaacaaaaaaacctgtaattttccgtgctacaccacaatggtttgcttcaatcagtaaagtaagacaagatattttagatgcaatcgaaaatacaaacttcaaagtaaattggggtaaaacacgtatttacaatatggttcgtgaccgtggcgaatgggttatttctcgtcaacgtgtttggggtgtaccgttaccagtattttatgctgaaaatggcgaaattatcatgacgaaagaaacagtgaatcatgttgctgatttatttgcagaacacggttcaaatatttggtttgaaagagaagcgaaagacttactaccagaaggatttacacatccaggcagccctaacggtacatttactaaagaaacagacattatggacgtttggtttgattctggttcatcacaccgtggcgtgttggaaacaagaccggaattaagtttcccagcagatatgtatttagaaggtagtgaccaatatcgtggttggttcaactcttctattacaacttcagttgctacaagaggagtatcaccttataaattcttactttctcatggttttgttatggacggtgaaggtaagaaaatgagtaaatctttaggtaatgtgattgtacctgaccaagtggttaaacaaaaaggtgctgatattgcgagactttgggtaagtagtacggactatttagctgatgttagaatttctgatgaaattttaaaacaaacatctgatgtttatcgtaaaatcagaaatacattaagatttatgttaggtaatattaatgatttcaatcctgatacagatagcattcctgaatcagagttattagaagttgatcgttacttgctaaatcgtttacgtgaatttactgcaagtacgattaacaactatgaaaactttgactacttaaatatttatcaagaagttcaaaactttatcaatgttgagttaagtaatttctatttggattacggtaaagatattttatatattgaacaacgtgattctcatatccgtcgtagtatgcaaacagtgttatatcaaattttagttgatatgacgaagttgttagcaccaatcttagtgcatacagctgaagaagtttggtctcatacaccacatgttaaagaagaaagtgttcacttagcagacatgcctaaagttgtagaagtagatcaagctttattggataaatggcgtacatttatgaatttacgtgatgatgtgaaccgtgcattagaaactgctcgtaatgaaaaagttattggtaaatcattagaagctaaagttacgattgctagtaacgataaatttaatgcatctgaattcttaacttcatttgatgcattacatcaattatttatcgtgtcacaagttaaagttgtagataagttagatgatcaggcaacagcttatgaacatggtgatattgtcatcgaacatgcagatggtgaaaaatgtgaaagatgttggaactattcagaggatcttggtgctgttgatgaattgacgcatctatgcccacgatgccaacaagttgtaaaatcacttgtataattgaaattgtataaagtacttatacagatgatataaattaaagctctcttcataatcatgttgtagtttttgttgacatgatgaagagagttttttttgagagttgatttgtcaatttaagtgcaacagttcatcacataaaacttcataaggaaacttccaatttaaacactttcttggtcgataattaattgagtctaatgcatagttaagttgctcttgatttactttagctaagtctgttttcttagggaaaaattctcttagtaaaccattggtattttcatttgtacctctttgccatgcggaatatggatcagcgaagtagacattaatattaaattggttttcaatattttgataacaagagaactctttccctctatcgacagtaatagttttaacggcacctttaggtagatgtttgataaggttattaattgccgtctccatagaattagaggaacgatcaggcataagtacacaataataataacgtgattttctttctgcgaaagtagcaatgcaccctttacttttgcctctgctggatacaattgtgtcagcttcccaatgaccgaatgtattacgtttctttatttccttaggacgttgtgaaataggacggccaatattaaacttacctctagtttctttaggtttctgtctttttcctttttgacgaaggcatgaaataagttcgaaattaatcatattagagttaatccatcgatagatggttttaaaacagatttggttttgtaatagacgacctacgatttgttcaggagaccagtggcattttaaataatatttaatgatattaccaagttctggagtaaatcgagtaggacgaccacaaagttttcttttggtttcataatttttttgagctgtttcagcttgatatgactgatttaaattattcctactaatttcacgtgagatagtagatacagatcgttttaatttacgtgcaatagatcttaaagaataattttcttgacgtaaaacctctatacgtgcgcgttcagttagtgtaagatggttatagctcatgttggcactccttgtatgtgtttttgtggttattaacatcttacaacaaagtgccaattatgggcattttttatgaatttttataggtgttgcacttaatattacaatccgtcatatgtaaaaaaatgtgtgatttactaaaataaaaattattcaggaatggtacaaattctctgaagcttataaatgcgttatagttgctattctcaattatgttcgcgataattttaagtaaaagtaagcacagatattgaatttgataggagttaattgaatgtatcataacagtaacgcaaactttgtaaatggtatcactttaaatgtgagagataagaatgaattaaagccattttatgaggacgtattaggattaaatattataaatgagacattaacatcgatccaatatgaagtaggtcaaaataatcatgtcattacacttgttgaattacaaaatggacgtgaacctttaatgtcagaagcgggactgtttcatatcgcaattaaactacctcaaattagtgatttagctaatttactaattcatttaagcgaatatgatattccagttaacggaggtatacagcctgcttcgttatcattattttttgaagacccggaaggaaacggttttaaattttatgttgataaagacgaagcgcaatggacgaggcaaaatgatttagtaaaaattgatattagaccattaaatgtaccgagattagtgagtcatgcaacaaaattgttatggttaggtattccagatgacgctattataggtgcattgcatattaagacaattcatttatcagaggtaaaagactactacctcgattattttggattagagcaatcggcatatatggatgattattcaatatttttagcatcgaatggctattatcaacatttggccatgaatgattgggtatcagcaacgaaacgtgtagaaaattttgatacgtatggattagcaattgttgactttcattatcctgaaacaacacatttaaatttacaaggtccggatggtatctattatcgctttaatcatatcgaagttgaagattagtaaatactttgaatggacgaaccatataatgaatcgtttttaatgatctttttatacaagctatgaaggcagtcttatgaggtttcccatgaggctgctttcataatttttaatgtcaaaacatagtagtttatcaagtattgagttagtaacattagatttaatgtaatatgcttactttttttattagcaggtgtaagctataatataaagagttgtcttatggacgattgattggaggaacgaaaatgcacaaaaaatattttattggcatttccattttaatagcagtatttgtcgttatatttgaccaagttactaaatatattatagctactacaatgaaaattggagattcatttgaagtgataccgcactttttaaacataacatcacatcgaaataatggtgctgcatggggaatattgagtggaaaaatgacatttttctttattattaccattattatattaatagccttagtatatttctttattaaagatgctcaatataatttgtttatgcaagttgctattagtttactttttgcaggtgcacttggaaactttattgatagagttttaacaggagaagttgttgactttattgatacaaatatttttggttatgattttccaatatttaatatcgcagattcaagtttaacaattggtgtaatattaattattattgccttattaaaggatacttccaataaaaaggagaaggaggttaagtaatggagacttatgaatttaacattacagataaagaacaaacaggtatgcgtgtagataagttgctgcctgaattaaatagtgattggtctcgtaaccagatacaagattggattaaagcaggtttagtcgttgcaaacgataaagttgttaaatctaattataaagtgaaacttaatgatcatatagttgtcactgaaaaagaagtggttgaagctgacattctacctgaaaatttaaatttagatatttattatgaagatgatgacgttgcagttgtttataaaccgaaaggcatggtagttcatccatcaccaggtcattataccaatacattagttaatggtttaatgtatcaaattaaagatttatcgggtattaatggagaaattcgtccaggtattgttcaccgtatagatatggatacttctggtttattaatggttgctaaaaatgatattgctcatcgtgggcttgtagaacaattaatggataaatctgttaaaagaaaatatatcgctttagttcacgggaatattcctcatgattacggaacaatcgatgcgccaattggtagaaacaaaaatgatcgtcaatctatggctgttgttgatgatggtaaggaagcagtgacacattttaacgtactagaacattttaaagattatacgcttgttgaatgtcaacttgaaacaggacgtacgcatcaaatccgtgtgcacatgaaatatattggcttcccattagttggtgatccaaagtatggaccgaaaaagacattggatattggtggtcaagctttacatgctggacttattggattcgaacatccagtaacaggtgaatatattgaaagacatgctgaattagcacaagactttgaagatttattagatacaattcgaaaaagagatgcataattgtgtcgtgctataattacgataacattattatgtaaactataagtatttatcgttttcgtttttttaaaaatgaaaacacattataaaatagattaaggttaacatttttactgagaatggttaatttttcaatatagattgacaaagcgcctgattagtattatccttataacagtttaagtacaacataaagagtctttaattgagcgttcagagagacgtcaaagacatgaaaatatagatatatactaaaatgaatcataacactttcacatatgcaagaataagtagtaatactacgattcttctatgtaaataggatgattgtatatactaaacctcatgtcgatattaaagacatgaggttttttgtttctaaattttgaaagggtgagaatatgtctgaacgtatcataatggatgatgccgcaatacaacgtacagtaacgagaatcgctcatgaaattttggagtataacaaaggtactgataatttaattcttttaggtatcaaaacaagaggtgaatatttagcgaatcgtatacaagataaaattcatcaaattgagcaacaacgtatacctactggaacaattgatattacatactttagagatgatatagagcacatgtcatcacttacgacaaaagacgcaatagacatcgacacagatattacagataaagtagtcatcattattgacgatgtgctgtatactggtcgaacggttcgtgcttcacttgatgctattttgctaaatgctagacctattaaaattggtttggctgctttggttgatcgaggacatcgtgagttaccaattcgagcagattttgttggtaaaaatatacctacttctaaagaggaaacggtaagtgtctatttagaagaaatggatcaaagaaatgcagttataattaaataataccccttttaattcagtacgagagactgaaaaaggtgggggagttgaatgataaataagttttcatatgcttgtttatctaataataccctcatgttcgacaactataagtcaatttctatggacgaaaatgacttgtagcaacttgtcacactttttgtctctttacatatactgatgtaaagagatttttttattatcggaggaaatgaatattatgcaaaatgatgaaatgtttgaacgaacagtaaaacctgtactagatgtaaatgaaaaaccacaaccagcgcaatgggcatttttaagcttacaacatttatttgcgatgtttggcgcaacagtactagtaccattcttaacaggattaccaatatcagcagcgttactagcttcgggaatcggtacattactttatatcttaataacgaaggcgcaaataccagcatacttgggatctagctttgcatttatcacaccaattatcacgggattaagtacgcatagcttaggagacatgcttgtagcattattcatgagtggtgttatgtacgtcatcatcgggattctaatcaaattaagtgggacagcatggttaatgaaattattaccaccagttgttgtaggaccagtcatcatggtaattggtttaagcttagcgcctactgcagtcaatatggcaatgtatgaaaatcctggagatatgaaaggttacaatatcagtttcttaattgttgcaatgataaccttgcttgtaacaatagtcgttcaaggattttttaaaggattcctatctttaattccagtacttgtaggtattatcgtaggttatgtggtagcgatttttatggggattgtgaaatttgatgcaattatgtcagcaaaatggatagatttccctcatatttatctgccatttaaagattatgtaccttcatttcacttaggacttgtacttgtaatgattccgattgtgttcgtaacagtaagtgaacatattgggcaccaaatggtactgaataaaatcgtaggtagaaacttctttgaaaagccaggacttgataaatcaatcattggtgatggtgtttctacaatgtttgccagtattattggtggaccaccaagtacaacatatggtgaaaatatcggtgtattagcgattacaagaatatacagtatttacgtcattggtggtgcggcagttatagcaattgttttagcattcattggtaagttcactgcattaatttcttctatacctacaccagttatgggaggagtatctatattacttttcggtattattgcagcaagtggcttaagaatgttagttgaaagcaaagtagattttgcgaacaatcgaaatttagttatagcttcagtaattttagttgtaggtatcggtaatttagtatttaacttaaaagaaattggtatcaaccttcaaattgaaggaatggcattagctgcactttcaggaattattttgaacttaatcttacctaaagagaaaaaacaaaacaattaagatttacaaattaaggagggcgcttttatgaatcatttattatcaatggaacatttatctacagatcaaatatacaaacttatccaaaaggcaagtcaatttaaatctggtgaacgtcaactaccaaactttgaagggaaatatgtcgcaaatttattctttgaaaattctactcgaacaaaatgtagttttgaaatggcagaacttaagctagggttaaaaacgattagctttgaaacatcaacatcatctgtttcaaaaggtgaatctttatatgacacatgtaaaactttagaaagtattggctgtgatttattagtcattagacatccgtttaataactactatgaaaaattagcgaatattaacatcccaattgcgaatgctggtgatggtagtggacaacatccaacacaaagtttgcttgatttaatgacgatatatgaagaatatggatattttgaaggcttgaatgtattgatttgtggcgacattaaaaattcacgtgtcgcacgtagtaattaccatagtttaaaagcattaggtgcaaacgtaatgtttaatagcccaaatgcttggattgatgattctttagaagcgccttatgtaaatatagatgatgttatagaaacagtagatatagttatgttattaagaattcaacatgaaagacatgggcttgcagaagaaactagatttgcagcagatgattatcatcaaaagcatggcttaaatgaagtgcgttataacaaattacaagaacatgctattgtcatgcatccggcacctgtgaatagaggagtagaaatacaaagcgatttagtagaagcttcaaaatcaagaatttttaagcaaatggaaaatggcgtttacttaaggatggcagtcattgatgaattattaaaataggtaaggggacgaaaatgatgaaattaattaaaaacggtaaagtattacaaaatggtgaattacaacaagcagatattttaattgatggtaaggtaattaaacaaattgcacctgcaattgaaccaagcaatggtgttgacatcatagatgcgaaaggtcactttgtgtcacctggatttgtcgatgttcatgttcatttacgcgaacctggtggtgaatataaagagacaattgaaactggtactaaagctgctgctagaggcggatttacaactgtatgtccaatgcctaacacaagaccggtaccagattctgtagaacattttgaagctttacaaaaattaatcgatgacaatgctcaagtacgtgtattaccttatgcttcaattacaacacgtcaattaggtaaagaattggttgatttcccagcactagtaaaagaaggtgcctttgcgtttacagatgacggtgtaggagtacaaactgcaagcatgatgtatgaaggcatgattgaagctgcaaaagtaaacaaagccatcgtagcacactgtgaagataattcattaatctatggtggtgcaatgcatgaagggaaacgcagtaaagagttaggtataccaggtattccaaacatttgtgaatctgttcaaatcgcaagagatgtactattagctgaagcagcaggttgtcattatcatgtatgtcatgtttctactaaagaaagtgttagagtcattcgtgatgctaaacgcgcaggcattcatgttacagctgaagttacaccacaccatttattgttaacagaagatgatattcctggtaataatgccatttataaaatgaatccaccattgagaagtactgaagatagagaggctttgttagaagggttactagacggtacaattgactgtatcgcaacagaccatgcaccacatgcacgtgatgaaaaagcacaaccaatggaaaaagcaccattcggaattgttggcagtgaaacagcattcccattattatatacgcattttgtaaaaaatggtgattggacattacaacaattagtagattacttaacaattaaaccatgtgaaacatttaatttagaatacggcacattaaaagaaaatggttatgcagatttaacaatcattgatttagatagtgaacaagaaattaaaggagaagatttcttatcaaaagcagataatacaccatttatcggctataaagtttatggaaatccgatcttaacaatggttgaaggcgaagttaaatttgagggggataaataatatgcaaagcaaacgttatctagtgttagaagacggttctttttacgaaggctaccgtttaggatctgataacttaactgtaggagaaattgtatttaatacagcgatgacaggttatcaagaaactatttcagatccatcatatacaggtcagatcattacttttacgtatccattaatcggtaattatggtatcaatagagacgattttgaatcattagtacctacattaaacggtattgtagtgaaagaagcgagtgcgcatccaagtaattttagacagcaaaagacacttcatgacgttttagaattgcatcaaattccagggattgcaggtgttgatacaagaagtattacgcgtaaaattcgacaacacggtgtgttaaaagctggttttactgatcgaaaagaagatattgatcaacttgtcaaacatttacaacaagtagaattacctaaaaacgaagtagaaatcgtttcgactaaaacaccgtatgtttcgacaggcaaggatctaagtatcgtacttgtagactttggtaagaagcaaaatattgttcgagaattaaacgtcagaggttgtaacgtcacagttgtaccatatacaactactgccgaagaaattttagcaatggctccagatggcgttatgctatcaaacggaccaggtaatcctgaagttgtagaatgtgcgattccaatgattcaaggaattttagggaaaattccgttctttggtatctgtctaggacatcaactttttgcattatctcaaggagcaagctcatttaaaatgaagtttggtcatcgtggtgcgaaccatccagttaaaaatttagagactggaaaagttgatattacgagtcaaaaccatggatatgcaatagatatagattcgttaaaaagtactgatttagaagttactcatcttgcattaaatgatggtactgtagaaggtttaaaacataaaacattaccagcattttctgttcaataccatcctgaagcaaatccaggaccgtcagattcaaactatctatttgatgattttgtagcaatgatgactaattttaaggaaaaggagcgtcatatcaatgcctaaacgtaatgatatcaaaacaattttagtaatagggtctgggccaattatcataggtcaagcagctgaatttgattatgctggaacacaagcatgtctagctttaaaagaagagggataccgagttattcttgtaaattcaaatccagcgacaatcatgactgataaggaaattgcggataaagtatatatcgaaccgttaactcatgattttatagcgcgaattatacgtaaagagcaacctgacgctttacttccaactttaggtggtcaaacaggtttaaacatggcgattcaactacacgaaagtggtgtgcttcaagataataacgtccaattattaggaactgagctaacatcaattcaacaagcagaagaccgtgaaatgtttagaacattaatgaatgatttaaacgttcctgtgccagagagtgacattgtaaatacagtagagcaagcctttaaattcaaagagcaagtgggatacccgctaattgttagaccagcatttacgatgggtggtaccggaggcggtatttgtcataatgatgaagaattacatgaaatcgtttcaaatggtcttcattatagtccagcaacgcaatgtttattagaaaaatctatcgcaggttttaaagaaatcgaatacgaagtaatgcgtgataaaaacgataatgccatcgttgtatgtaacatggaaaatattgatccagttggtattcatacaggcgattcaattgttgtagctcctagccaaacattatcggatgttgagtatcaaatgttacgtgatgtttcattaaaagttattcgagcattaggtatcgaaggtggttgtaatgttcaattagcattagatccccattcattcgattattatattatagaagtaaatccgcgtgtatcacgttcatcagcgttagcttcaaaagcaacaggatatcctattgcaaaattagctgctaaaatcgcggttggtctaacattagatgaaatgttaaatccaattacaggaacatcttatgcagcgtttgaaccaactttagactatgtgatttcaaaaataccaagatttccttttgataaatttgaaaaaggagaacgagagcttggcacacaaatgaaagcaacaggtgaagttatggccattggtcgaacttacgaagaatcattgttaaaagcaattcgatcacttgagtatggtgtgcatcacttaggattaccaaatggtgaaagcttcgatcttgattatattaaagaacgtatttcacaccaagatgatgaacgattatttttcatcggcgaagcaattagaagaggcacaacattagaagaaattcataatatgactcagatagattacttcttcttacacaagttccaaaacattattgatattgagcatcaattaaaagagcatcaaggtgatttagaatatcttaaatatgcaaaagattatggatttagtgataaaacaatagcgcatcgctttaatatgacggaagaagaagtatatcaattgcgtatggaaaatgatattaaacctgtttacaagatggttgatacttgcgcagctgaatttgaatcttcaacaccatattattatggtacatacgaaactgaaaatgaatccatagttactgacaaagaaaaaatcttagtattaggctctggaccaattcgaatcggccaaggtgtagaatttgactatgcgacagttcacgccgtttgggcaattcaaaaagcagggtacgaagcgataattgtgaataacaatccagaaacagtttcaacagacttctcaatttctgacaaattatactttgaacctttaactgaagaagatgtgatgaatatcattaatttagaaaaacctaaaggtgtcgttgtacaatttggaggacaaacagcgattaatttagcagacaaattggctaaacatggtgttaaaatacttggtacttcactagaaaatctaaatcgtgctgaagatagaaaagaatttgaagcactattaagaaaaattaacgtgccacagccacaagggaaaacagctacatcacctgaggaagcattagcgaatgctgcagaaatcggatatccggttgtagtaagaccttcttatgtattaggtggtcgcgcaatggaaattgtagacaatgacaaagagttagaaaactatatgacccaggctgtaaaagcgagtccggaacatccggtattagtcgatagatatttaactggtaaagaaattgaagttgatgcgatttgtgatggagaaacggtcattattccaggaattatggaacatattgaacgtgctggtgtgcatagtggtgactcaatcgctgtatatccgccacaaactttgacagaagacgagttagcaacgcttgaggactatactataaaattagctaaaggtttaaacatcattggcttaatcaacattcaattcgttatagctcacgatggtgtgtatgttttagaagtaaatccacgttctagtagaacggtaccattcttaagtaaaattactgatattccaatggcacaattagctatgcgagcaatcattggggaaaaactaacagatatgggttatcaagaaggggttcaaccatatgctgagggtgtatttgtgaaagcaccggtatttagttttaataaattgaaaaatgttgatattactttaggacctgaaatgaagtctacaggtgaagtaatggggaaagatacaacattagaaaaggcgttattcaaagggttaacaggtagtggtgttgaagttaaagatcacggtacagtattaatgactgtcagtgacaaagataaagaggaagttgttaaattggcacaacgcttaaatgaagttggctataaaattttagcaacgtctggaacagctaataaattagctgagtatgacatacctgcagaagtagtaggcaaaattggtggcgaaaatgatttattaacacgtattcaaaatggtgatgttcaaatcgttataaatacaatgactaaaggtaaagaagtagaaagagatggcttccaaattagacgtactacagttgaaaatggtattccatgtttgacatctttagatacagctaatgccttaacgaatgtaattgaaagtatgacatttacaatgcgtcaaatgtaaatcaatcaaactgtatcggtggggctgtaattaaccatttacttaaagaagtttatattacagcctcattattttagtgaatttcttaacgtaaagggagacatatatgatgaaagatttaccaattattgcattagattttgaatcaaaagaaaaagtaaatcaatttttagatttatttgatgaatcattattcgtaaaagtaggtatggaacttttttatcaagaaggtcctcaattaattaatgagataaaagaaagaggccatgatgtatttttagatttaaaactgcatgatattcccaatacagttggtaaagcgatggaaggactagctaaattgaatgttgatctggtaaatgttcatgctgctggtggcgtaaaaatgatgtctgaggccattaaaggattaagaaaacataatcaacatacaaaaattattgcagtaacacagcttacgtcaacaacagaagacatgttacgacacgaacaaaatatacaaacatcgattgaagaggccgttttaaattatgccaagttagcaaatgcagctggtttagatggcgttgtttgttcacctcttgaaagtcgtatgttgactgaaaagttaggtacatcatttttaaaagtaacaccaggcattagacctaaaggtgcatctcaagatgaccaacaccgtattacgacaccggaagaagcaagacagcttggttcgacgcatattgtagtcggtagaccgattacacaaagtgacaatccagtcgaaagttatcataaaattaaagaaagttggttagtataatggctaaagaaattgcaaaatcattattagatattgaagctgtaacattatcaccaaatgatttatatacatggagttcaggtattaaatcaccgatttactgtgataaccgtgttacgttaggttatcctttagttcgaggcgcaatccgcgatggtttaattaacttaattaaagaacactttcctgaagtagaagttatttctggtactgcaacagctggtattccacatgcagcttttattgctgaaaaattaaaattaccaatgaattatgttcgttcatcaaataagagtcatggtaagcaaaatcaaattgaaggtgctaaaagtgaaggtaaaaaagtagttgtgatagaagatttaatttcgacagggggatcttcagtcacagcagttgaagccttaaaacaagcaggtgcagaagtattaggtgttgttgctatctttacttacggtttgaaaaaagcagatgatacatttagcaatattcaactacctttttacactttaagtgattacaatgaattaattgaagtagctgaaaatgaaggtaaaatttctagtgaagatatccaaacattagttgaatggagagacaacttagcataatatagacactagaaggaggaattcaacaaatgaatgacaaaacatctaatgatttatatgggaagataaaacattgtaacgaatttatcaatcattcaaatgattccaatctatctagtagtcacgatgtcgacgaaagttcaacgaagcaaaaacatataaaaaataaaacaactataaatcataatgatgatttatttaaacatgtaaaggatatattacgtaaacaaggacaaatttaaaaacaaaaaagctatagtgtttaatatcaggggctgcttaaccgcatccgaatattacaaacactatagcttttattatataaaaaatttattagcggataattaactttattaaaatccaaccaattaagaatacgagtaataggactaatactggaatcacataatgtaacataacgtccctcctttaacttaattttaattgtaatcaaatttgacaataagtcaaaacattaatacctatgataagtatcatttattaacatatgtatcatatttttaatcttgcgtaatttttatcgttaactatgtgatttaatcaacaggccaataagacatttgtcattcgtgcacataacggtacgacgcgcttttgtcattttaattatgttaagataatagtagttatagaagttcaatctataggaggcatagcatggatattccaaaaattacgacatttttaatgtttaataaccaagctgaagaagctgttaaactatacacaagcttatttgaagatagtgagattataacaatggctaagtatggtgaaaatggacctggtgatcctgggactgtacaacactcaatatttacattaaatggacaagtattcatggcgattgatgctaatagtggcacagaattaccaatgaatcctgcgatttcattatttgttacagtaaaagatactattgaaatggaacgactatttaatggattaaaagatgaaggtgccattttaatgccaaaaacgaatatgccaccatacagagagtttgcttgggttcaagataagtttggagtaagttttcaattagcattacctgagtaaaaggattcgtacagcgttgaatgataaagaaacactttttcttatgcatgcgttttacctatgtattcctattttaagtacacattatcattttagtttcactcatttttaaaatcacaaagataatttttaacttaaatgatgatacgttattaaaaaacacgatacttcgtttcaatgaacgcatcaaattaaaaataaacacctcgcaaaagaaagtaggcctttcttatggtgaggtgtttatttgtcgacaacttgattatgattgtttcattttttgaatatgttcataatcaggtgtagcatacaaagttttttgattgtcatatgttacaaacccaggctttgcacctgatggtttgtgcacatttttaattaacgtgtaatcaacaggtatttgtccagaattaccagcttttgaaaagtatcctgctaacatagccgcttccttgattgtcgtatcacttggtgcatcattaaatataacgacatgtgaaccaggaatatcttttgtgtgtaaccatgtgtgagtttttttagcttttttatttgttaaataatcattttgcttgttattcttgccaacatatatatcgtcgccatcagttgatacataatgttgtaattgaatctgcgctttctttttcttagtttgatttttacgctgtttcataaagccttgttctgctaattcatctctaatttcatcaatgtcatggacagaaatatgatgtaattgttgttcgattgttgaaaaataatctatattgtctttcgtcaattgaatttgatgttgtaattcacgttctctcgttttcatacgattatattgtttataataatattgagcatttgcagatggggattttgtaggatttaaaggaatgacaacttcttcattcgtataataattcaatgccgtcacttctttatcgccttgcttaattcgatatatattagcagtaatcaattcaccatataactgttcagtatctttatttttagactgctcatattcttcaatcaacttcgctaatttattttgatatttgtgcaactgctgttgaacaaatcgaactaaatcattcgcacgttgtttaacgcgttcccgttcgccacgcgcatcataaaaacgatcaagtaaatcatttaatgaatcgtacgtaactgtatcatcattaaattgatttaactttataaaatagaaatcctctttacctgtttcatgatttttatgaaaaataggagtaggtggtaacttggtttctgccattacttcgtcgaatgcttctggtaaagttgatgaagtcataaattgacgacgattaacgatttcattcgtaattaaagggctaaacccttcaaactgattcaataattgtttagcaatattacctgcgttaaaatcgatatatttcaacacctctgcacctgtaatatcatacggattcattttgtgctgagtaggtggtgcttcataattaaatcctggcattactgttcgatagtgattcgtatttggtgttaagtgtttaaatccttcaattattttacgattttcatctactaaaattaagttactatgtttacccataatctcaaggatgacagtgcggtaaatagtatcgccaatttcatctttactctttatatcgatttcaatgcgacgatcattaccaatttgcttaatcgattcgataataccaccttctaagtgttttctaaaaacacgcgcaaacatgggtggattaaatggattatcatattttttagtagtcaattgtaatcttgaaaagtttggatggattgacaataacaattgatggttttgtctattttgacgtacaaccattagtatcgtgtcattatcaggttgattgattttgtgaacgcgtcctgttgttaaaaattgtagagactcaaccattttctttgtaaataagccatcataagccataatttatcttccaccttcttcatatcattcgtttcattttaacatgattgtaacttttcggtatagttattgaatcatacattatgccacacatttaacattatctaaaagttcgcaattcaatttatttaattaaaattaatcgtgcaatataacgatattgttagacctaatagaaattatggcatgcaatttcaaatatgctatacaatataaagaacaatgtgatatcatatttaaataatagaagattagcttagagaggtcgtaaggcatggataatgaaaaaggattgttaatcgttttatcaggaccatctggagtaggtaaaggtactgttagaaaacgaatatttgaagatccaagtacatcatataagtattctatttcaatgacaacacgtcaaatgcgtgaaggtgaagttgatggcgtagattacttttttaaaactagggatgcgtttgaagctttaattaaagatgaccaatttatagaatatgctgaatatgtaggcaactattatggtacaccagttcaatatgttaaagatacaatggacgaaggtcatgatgtatttttagaaattgaagtagaaggtgcaaagcaagttagaaagaaatttccagatgcgttatttattttcttagcacctccaagtttagatcacttgagagagcgattagtaggtagaggaacagaatctgatgagaaaatacaaagtcgtattaacgaagcacgtaaagaagtcgaaatgatgaatttatacgattacgttgtagttaatgatgaagtagaacttgcgaagaatagaattcaatgtattgtagaagctgagcacttaaaaagagagcgcgtagaagctaagtatagaaaaatgattttggaggctaaaaaataatgttaaatccaccattaaaccaattaacgtcacaaattaaatcaaagtatttaattgcaacaactgcagcgaaaagagcgcgtgaaattgatgaacaacctgaaactgaattattaagtgaatatcattcatttaaaccagttggtagagcgttagaagaaattgctgacggtaaaattcgccctgttatttcaagcgattattatggtaaagaatagtttcgaccattaaaaatatgtgaagcaagacgtatatcaaatacgtcaaggcatatccaaatcaaacgcacctatgtaggtgtgtttttttagtttatccaatgattgatgttataataatactaaatttgtatctataaaaaagtaatgagcatttgtgcgcatatgatgatgtaaagcgtaaatgtcatagtgatatttaagggagattgaatatgaagaaaatattgttagccgttacaggtggcattgcggcatataaagcgattgatttgacaagtaagttaacacaatctgggtatgaagttcgcgttatgttaacgaatcacgcacaaaaatttgtgacaccattagcatttcaagcaataagtcgaaatgctgtttatacagatacttttatagaagaaaatccttcagaaatacagcatatagcattaggtgattgggcagatgcaatcattgttgcacctgcaacggcaaatacaattgcaaaattgagtgtaggtattgctgatgatttggtgacatcaacgttgctagcaacagagacaccgaaatttattgcgcctgctatgaatgtgcatatgtatgaaaataaacgtacgcagcaaaatattaatattttaaaagaagatgggtatcattttatcgaaccaggaagcggatttttagcatgtggttatgttgctaaaggacgtatggaagaaccgcttcaaatcgtttctgttattgatgctcattttcaaaatagtaatcgtttagctaatagttcatttcaagataaacgcgcattggttacagccggaccaactattgaagttatcgatccagtcagatttgtatccaatcgttcttctggaaaaatgggttatgcaatagctgaagcattgcgaaatcgaggagctatcgtgacattagttgcggggcctacaacactagaggatccaaaagatattgaagttattcatgttcaaagtgctgaagaaatgtttgaacaagtgacaagccgatttgacgaacaagatattgttgtaaaagcagcagccgtatctgactatacaccggttgatgtattagaacataagatgaaaaagcaggacggtgatttgtcagtatcttttaaacgtactaaagacattcttaaatatttaggtgaacataaaacatcacagtatttaataggctttgcagcagagactgaagatattgaaaattatgcacaacaaaaattacgcaagaaaaatgcagatgtgattatttcaaataatgttggagatatgtctatcggatttagttctgatgataatgaattgacaatgcattttaaaaataatgaaaaagtaaatatcaagaaaggaaaaaaagtagtattagctgcacaaattttagatgaactagaaactaggtggcaataatgatagcgaaagtcatagtcgatgtcgcgtcgaagagcgttgactataaatttgattatataattcccgaacaactcgaatctgtcatccaacctggtgtgcgtgtgattgtaccttttggaccaagaacgattcaaggttatgtaatggaagtaacagcagaacctgatgcacaacttgacgtttcgaagttaaaaaaaatcatagaagtgaaagatatacaaccagaattaacatcagaattaatagctttaagtgagtggatgggttcaactcatgtcattaaacgtatttctatgctagaagtgatgcttccgagtgctattaaagcgaagtataaaaaagcatttaagatgaaagatgacatagaggtaccttcaactttattacaaaaatttgataagcatggttactattattataaagatgcgcaaaaaaataatgatattcaattgcttatgaagttgttaaaagatgatatcgttgaagaaagaacgattctcacacaaaatataactaaaaaaaccaagcgtgctgttcgtgtcattgaagggtatcatcctgatgaagtattagctaagttggagaaagttattaaacaatatgatttgtatgcttacttgtctgaagaacaacataaaacaatatttttaactgatattgaggatatgggcttttcaaaatctagtttagatggacttatcaaaaaaggttatgttgaaaaatatgacgcggttgttgaaagagacccatttaaagatcgtgttttcgaacaagaatcaaaacagcaattaacagaagaccaatataaagcatatgaagcgattaaagctaaaattgtaagccaagagcaagaaacatttttacttcatggtgtgacgggatcaggtaaaacagaagtatatttacaaacgatagaagatgttttaagtcaaggaaaacaggcgatgatgttagttcctgaaatcgctctaacaccgcaaatggttttacgcttcaaacgtcgatttggtgatgacgttgctgtattacattctggcttatctaatggggaacgttatgatgagtggcaaaaaattagggatggtcgtgcgagagtaagtgttggtgcaaggtcaagtgtgttcgcacctttcaaaaatttagggttaatcatcattgatgaagaacatgaatctacatataagcaagaagattatccgagatatcacgctagagaaattgcccaatggcgaagtgaatatcatcactgcccagtcattttaggaagtgcaacaccatgtcttgaaagttatgcacgagctgaaaaaggtgtttatcatttgctatcattaccaaacagagtgaaccaacaagctttacctgaaattgatatcgtagacatgcgtgaagaattgagtgaaggtaatcggtcaatgttttcaaaagatttacgtgaagccatacaattaagattagatcgacaggaacaagttgttttatttttaaatcgacgtggttatgcatcatttatgttatgtcgggattgtggatatgtaccgcaatgcccaaactgtgatatttcattaacgtatcataaaacgacagacttattaaaatgtcactattgtggttaccaagagacaccaccgaatcaatgtccaaattgtgagagtgaacacattcgacaagtaggtactggtactcagaaagttgaagaactattgcaacaagaatttgaagatgcgcgcataattaggatggatgtagatacaacctcaaagaaaggtgcacatgaaaagttattgactgaattcgaaaaaggtaacggtgacattttactaggtactcagatgattgcgaaaggattagattatccaaacattactttagttggtgtgctgaatgcagatacaatgttaaatttacctgattttcgggcgagcgaacgtacttatcaactattaacgcaagtggctggtagagctggtcgtcatgaaaaggcaggtcaagtcatcattcaaacgtataatccagatcattattcaatattggatgttcaaaaaaatgattatttaacattttatcgtcaggaaatggaatatcgtaaattaggaaagtatccaccgtattattatttgattaatttcacaatctcacataaagaaatgaagaaggttatggaagcatcgcaacatgttcataaaattttattacagcatttaacagaaaaagcgcttgtactaggtccatctccggcagcacttgcgagaatcaacaatgaatttagattccaaattttagtgaaatataaaagtgaacctggattattacaagccattcagtttttagatgactattaccatgaaaaatttataaaagaaaaattagcgttgaagattgatattgatccacagatgatgatgtaattttttgactaaaacactttaataccaatgtttcctaagagtttgaaaggtcttgtttttactttaagggcagaaaaagggcagaatatacaactgttaaccatttaaattagcagtttatattctgtctttttatatggctttataacttacgtgattttgatttgattagggatttattagtattttcatttacgaattctgattttaatgtaagtgccatacttactgataaataaaagtactaatgattatgcaaactatttttaaatggcaaattgaaatggtgcaaattttacacttgtaatttaatggctataaactattttatatctatctatgttttaactacttaaattattagacaaaacaattttcttaaattatcaattaaagtatttaaaaatattgatggttaatgtaaaatatcaatataaataagttttttaaatttatgtatgtttatttgattcaaacaaaataacttaagaggagaaagtttatgaaaaagacactgggatgtttacttttaattatgcttttagtcgtagcaggttgttcttttggtgggaatcataaattatcatcaaagaaatcagaagaatcaaaacaagaaactgtaaaaaaagaatcggaagaagagaaagatccagatttagagaaatttgaagaaatagagaagaaaatgaaaggaattaaagatgcgccatctctagataagttggatccattaatgacagaaaagtcgtttacgaatagtaaagggattcaaggatggaaagattacaaagaattaatgggtaaagtggaacttgcagattatagatttacaaaagattcaaaaggatcttctataaaagatgttgatgcattctttaaaggtaagaaaggtataaaaaggaaagtgattgaaacacacgatgatgtaaaacaagttgattattggtatgtagatccagatggaaagaaaattggcaattcaaacacacctgttttttacgcagaaattatgacaaaatataaagatggaaagttagtttatgcatcagtcgaaccaggttcttacgtaatacataaagatgatgcaattaaatatgacgattattctaagttaaaaaaattaagtcaactaactaaacttgatcatccaaagccagttccatatagcgtagctcaaatcaaatctttcggagtacctttaacaagcgtttcatttatgacgcatggatcaaaggatactaaagatgaagtgatgccggcattggcatatttcactttttcaccaaaaaattatgaagacaagtctaatccagatccaaaagttttaaatttagtagggatggatttcttaaatgcatctagtgattttggtaacgcacattttgttgttctaagtaaatatattaaagagtacgaatcaaactatgaaacagcgtcagatgattctttaaaatagtatttactgtgcggaaaataaatagtgtgctacattaaataatcgcaataataatcccgataaacaatcagcattgctgcttatcatatagagttcgtaataactataactctatgattcgcaaataataaatgattgtcatcgggatttatttttatcaatttataaagtgacattaccttgttcatcagcaggtttgaaaacagtaatcactgcactaataattgctaaaatgtgtgggatacctgtccaacagaatattaagtgtagaataccttgcatattcttgccggcataaaatttatgaataccaaaactacctaagaacaatgctaataaaatataaataactttgtttacttgcatttctttccctccagttgaattgcttataatgacattagcttctctttttattatacccacttttagttcaaacattctagtttcagcattcccaatcatctaaatttcagtttttcaatccttacaataaatttaggatttcatttcagttgcattgtattattttacgtgtgaaatatacgtaatgaatcacattacaatctttaaattgaaaaatatacattctatgatgtaaggtcgcatttttaatatatttacgttataatggtttgatgaattttattgaggagtaagagctatggcgattaaaaagttagtaccagcatcgcatcctattttaacgaaaaaagcgcaagcagttataaaatttgatgattcgttaaaaagattattacaagatttagaagatacaatgtatgcacaagaagctgctggcttatgtgcacctcaaattaatcagtcattgcaagtggcaatcattgatatggaaatggaaggattattacaacttgttaatccgaaaattattagtcaatcaaatgaaacgataacagacttagaaggttcaattacattgccagatgtttacggcgaagtgacaagaagtaaaatgatcgttgtcgaaagttatgacgtcaatgggaacaaagttgaactaactgcacatgaagatgtagcaagaatgattttgcatattatagatcaaatgaacggtatcccttttacagaacgtgcggaccgtattttaacagataaagaagtggaggcatattttataaatgactaaaataatatttatgggtacaccagacttttcaacaactgttttagaaatgcttattgcagaacatgatgtcattgcagtcgtaacgcaaccagatcgacctgttggacgtaaacgtgttatgacaccaccaccagttaaaaaagttgcaatgaaatatgatttacctgtatatcagcctgaaaaattaagtggatcagaagaattagaacaattgcttcaattagatgtagatttaattgtaacagccgcttttggacaattattacctgaatcattgttggcattaccaaaacttggcgcaattaatgtacatgcatcattgttgccgaagtatagaggtggtgcaccaattcatcaggcaattatcgatggtgaacaagaaaccggcataacaattatgtatatggttaaaaaattagatgcgggtaatattatttcgcaacaagcaattaaaatagaagaaaatgataatgtcggtacgatgcatgataaattaagtgtattaggagcagatttattaaaagaaactttaccatcaattatagagggtacaaatgaaagtgtaccacaagatgatacgcaagcaacatttgcttccaatattcgacgcgaagatgagcgaattagctggaataaaccaggaagacaagtgtttaatcaaattcgaggattatcaccatggccagttgcttatacaactatggatgacactaacttgaaaatatacgatgctgaactcgttgagactaataagataaacgagcctggaacaattatagaaacgactaaaaaagccattattgttgctacaaatgataatgaagctgttgcaattaaagatatgcaattggctgggaaaaagagaatgttagctgccaattatttaagtggtgcgcaaaacacactagtagggaagaaacttatatgatagaaaacgtgagaagtcttgcttttgacacgattcaagatatattaaatgaaggtgcgtatagtaacttgcgtatcaatgaagtgttgtcagaaaatgaattaaatgtaatggataaagctttatttacagaaattgtctacggaaccgttaaaagaaaatatacgttagatttttatttaaagccttttgtgaaaacaaagattaaggcatgggttaggcaattattatggatgagtatttatcaatatgtttatttagataaagttccaaatcacgccatcattaatgaagcagttgaaatagcaaaagaacgcggtggctatcacaacggaaatgtcgtaaatggcattttacgaacaatgatgcgtagtgacttacctgattttaatgaaattgcagatcctaaaaaaagaatggcaatcgagtatagtatgccgaagtggattatagatcattgggcaacacattatggtctcgaagaaactgaaacgattttacagtcatttttagaaacgacatcaacaactgtgcgtgccaacctgacgcgagcatcattagatgatattattgaaaagttgcaagacgaaggttatgacgttgaaaaagatcatgacttaccttattgtctccatataggaggacaaccaattattcattctcgttcatttaaagatggattcgtttcaattcaagataaaagctcaatgtttgttgcacacattatgaatgtagaccgacatgatcacgtattagatgcatgtagtgcacctggcggtaaggcttgtcatattgctgaagttttaatgccagaagggcaagttgacgcttcagatatacatgatcacaaaatagacttaattaattttaatataaaaaaattacgattaacaaatattaaagcttttcaacatgatgcgacaaaaccttatgataaaacatacgataagatacttgttgatgcaccatgtagcggattaggtgttatgagacacaagccggagattaaatatactcaaagcaaacaacatattgagtcactagttgatttacagcttgaaatattggaaaatgtaaaaaacaatgtaaaaataggtggcgaaatcatctattccacatgtacaatagagcaactagaaaatgaaaacgtgatttatacgtttttgaaaaataataaaaacttcgaatttgaaccgtttcaacatccgataactggagagttggtcaaaacgttacaaatcatgccgcaagactttaattcagatggattctttatcactaagataaaaagaaaggacaattaggaatgataactgctgaaaagaaaaagaagaataaatttcttccaaattttgacaagcaatcaatatattcattgcgatttgacgaaatgcaaaactggctcgttgaacaaggtcaacaaaaatttcgagcgaaacagatttttgaatggttatatcaaaaaagagtagattcgattgatgaaatgacgaacttatcgaaagacttacgacagcttttaaaagataactttactgttacaactttaacaactgtagtaaaacaagaaagtaaagacggtacaattaaattcttatttgaattacaagatggctatacaattgaaactgttttaatgagacatgattatggaaattcagtatgtgtaacgacacaagtaggttgtcgtatcggatgtacgttttgtgcttctacacttggcggcttaaaaagaaaccttgaagctggcgaaattgtttcacaagttttaacagttcaaaaagcccttgatgctacagaagagcgcgtatctcaaattgttataatgggtatcggtgaaccatttgaaaattatgatgaaatgatggactttttaagaatcgtcaatgatgataacagtttaaatattggtgcacgtcacattacagtatcaacatcaggtatcattcctagaatatatgactttgcggacgaagatattcaaattaattttgctgtaagcttacacgccgcaaaagatgaagtgcgatcacgcttgatgccaattaaccgtgcatataatgttgagaagttaatcgaagcaattcaatattatcaagaaaaaacaaatcgtcgtgttacttttgaatatggtctgtttggtggtgtgaatgaccaactagaacatgcaagagaattagcacatttaataaaaggcttaaactgccatgttaacttaattcctgtcaaccatgttccagaaagaaattatgtaaaaacggctaaaaatgatatctttaaatttgaaaaagaattaaagagactaggaattaatgccacaatacgtcgtgaacaaggttcagatattgacgcagcttgtggtcaattaagagcaaaggaacgacaagtagaaacgaggtaaagacaaatgctagaggcacaattttttactgatactggacaacatagagataagaatgaagatgcgggtggtattttttataatcaaactaatcaacaacttttagttctgtgtgatggtatgggcggccataaagcaggagaagttgcaagtaaatttgttacagatgagttgaaatcccgttttgaagcggaaaatcttatagaacaacatcaagctgaaaattggttgcgtaataatataaaagatataaattttcagttatatcactatgcacaagaaaatgcagaatataaaggtatgggtacaacatgtgtttgtgcacttgtttttgaaaaatcagttgtgatagcaaatgtcggtgattctagagcctatgttattaatagtcgacaaattgaacaaattactagtgatcactcgtttgttaatcatcttgttttaacgggtcaaattacgccggaagaagcatttacacatccacaacgtaatattattacgaaggtgatgggcacagataaacgtgtgagtccagatttgtttattaagcgattaaatttttatgattatttattattaaattcagatggattaactgattatgttaaagacaatgaaattaagcgtttgttagtaaaagaaggtacaatagaagatcatggtgatcaattaatgcaattggcattagataaccattcgaaagataacgttactttcatactcgcggctattgaaggtgataaagtatgataggtaaaataataaatgaacgatataaaattgtagataagcttggcggcggtggcatgagtaccgtttatcttgcagaagatacgatacttaacattaaagttgcaattaaggcgatttttataccacctagagaaaaagaagaaacattaaaacgttttgaacgagaagtacataactcatcacagctatcacatcaaaatatagtaagtatgatcgatgttgatgaagaagatgactgttactacttagtaatggaatatattgaaggtccgactttgtctgagtatattgaaagtcatgggccattaagtgttgacacggcgattaattttacgaatcaaatattggatggcattaaacatgcgcatgatatgcgtattgtacatagagatattaagccacaaaatatattaattgacagcaataaaacgttgaaaatatttgattttggaattgctaaagctttaagtgagacgtctttaactcagactaatcatgtgttaggtactgtgcagtacttttcgccagaacaagcaaaaggtgaggcaacggatgaatgtacagatatttattctataggtattgtgttatatgaaatgcttgttggtgaaccaccatttaatggagaaactgcagttagcattgcgattaaacatattcaggattctgtgccaaatgtgacaaccgatgtacgtaaggatattccgcaatctttaagtaatgtcattttacgcgctacagaaaaagacaaagcgaatcgttacaaaacaattcaagaaatgaaagatgatttgagtagtgttttacatgaaaatcgagcgaatgaagatgtctatgaactcgataaaatgaaaacgatagcggtaccattgaaaaaagaagatctagcaaagcatattagtgaacataagtcgaatcaacctaaacgtgaaacgacgcaagtacctattgtaaatgggcctgctcatcatcagcaattccaaaagccagaaggtaccgtgtacgaaccaaaacctaaaaagaaatcaacacgaaagattgtgctcttatcactaatcttttcgttgttaatgattgcacttgtttcttttgtggcaatggcaatgtttggtaataaatacgaagagacacctgatgtaatcgggaaatctgtaaaagaagcagagcaaatattcaataaaaacaatctgaaattaggtaaaatttctagaagttatagtgataaatatcctgaaaatgaaattattaagacaactcctaatacaggtgaacgtgttgaacgtggtgacagtgttgatgttgttatatcaaaaggccctgaaaaggttaaaatgccaaatgttattggtttacctaaggaggaagccttgcagaaattaaaatcgttaggtcttaaagatgttacgattgaaaaagtatataataatcaagcaccaaaaggatacattgcaaatcaaagtgtaaccgcaaatactgaaatcgctattcatgattttaatattaaactatatgaatctttaggcattaaacaagtttatgtagaagactttgaacataaatcctttagcaaagctaaaaaagccttagaagaaaaaggatttaaagttgaaagtaaggaagagtatagtgacgatattgatgagggtgatgtgatttctcaatctcctaaagggaaatcagtagatgaggggtcaacgatttcatttgttgtttctaaaggtaaaaaaagcgactcatcagatgtcaaaacgacaactgaatcggtagatgtaccatacactggtaaaaatgataagtcacaaaaagttaaagtttatattaaagataaagataatgacggttcaacagaaaaaggtagtttcgacattactagtgatcaacgtatagacattcctttaagaattgaaaaaggaaaaacagcaagttatattgttaaagtagacggtaaaactgtagctgaaaaagaagtcagctatgatgatgtttaaatataattgaagtaaatgtaccgaggtttctatttggaagtctcggtatttttatgttgagattgcggtagttttaaaatgcttcatgtcatcatatacaggtgagcattgtctatgaattctgtatcactctcacaatatttatatcatttgaaatgatcatttatatattaattttccagtctttgatataataaatgcagtaaaattaatcgagaggtgccattttgaagacaggtcgaatagtgaaatcaattagtggggtatatcaagtagacgttaatggcgaacgtttcaatacaaaaccacgaggattatttagaaagaaaaaattttcaccggtagttggagatatagtggaatttgatgtacaaaacattaacgaaggctatattcatcaagtgtatgagcggaaaaatgagttgaaaagaccacctgtaagtaatatagatacactagtaattgtaatgagtgctgtcgaaccaaatttttcaacgcaattattagatcgatttttagttattgcacattcgtatcagttaaatgcgagaattttggtgacaaaaaaagataaaacaccaattgaaaagcagttcgaaattaatgagttgttgaaaatatatgaaaatattggctatgagactgaatttattggaaatgatgatgatcgaaaaaaaattgtagaagcttggtcagctggacttatagtacttagtggtcaatcaggtgtcggtaagtccactttcttaaatcattatcgtccagaacttaatcttgagacaaatgatatatcaaaatcattaaatcgaggaaagcatactacaagacatgtcgaactattcgaacgtcaaaacggttatattgcagacacacctggattcagtgctttagattttgatcatatagataaagatgaaataaaagattattttcttgaattaaatcgatatggtgaaacatgtaagtttaggaattgtaatcatatcaaagaacctaattgtaatgttaagcatcaattagagatagggaatattgcgcaatttagatacgaccattatttacaactatttaatgaaatttcaaatagaaaggttagatattaaatgacaaaactatatccatcattattatctgttgattttttggatttacaacatgaattaaaacgacttgaagaagcaggtgtcgacggagttcattttgatgttatggatggtcaatttgtgcctaatatatctattggtttaccaatattagatgcagtaagaaaaggcacaacattacctatagacgtacatttgatgattgaaaatccagaaaagtatattgcatcatttgcagaacatggtgccgatatgatttcaattcatgtcgaatcaacgcctcatattcatcgtgctattcaaatgattaaacatttagataaaaaagctggtgtagtaattaatcctggtacaccaatatcacaaattgaacctattttagatattgttgattatgtactagtgatgacagttaacccagggtttggtggtcaatcatttattgatcaatgcgtagaaaaaatagcgggtcttaatgctattaaaatggaacgtcaattaaactttgatattgaagttgatggaggcgtaaataccgatacagcgaaagtatgtgttgaaaatggtgctacaatgctagtaacaggttcatttttctttaaacaagaggattataaaaaagtcacacaagcattgaaaggttgagtgtatatgcatataaatttattatgttctgatcgacacttgccgcaagatatttgggccaaaagtaatgaaggtaaatggggcggcgttgatagaggtgctttgattttattgaagcatcaaattatcccttttttctcagtgggagactttgattcagtcagtaaagaagaacgccaacttctaacagaacagttacaaatcaaaccagttcaagctgaaaaagctgatacggatttagctttagcggttgataaagctgttgcacttggatttgatagtattacaatttatggtgcaacaggcggacgattagatcacttttttggggcaattcagttattattgaaaaaagcatattataaacatgatgttcatatagaagttatcgatcaacaaaataaaattgaattattgcctaaaggtcaacatacagttgaaaaagataagagttatccgtacatttcatttataccgatgactgatgatgtagaactttctctagcaggttttaaatataatttagctagacaaatgcttaatataggttctactttaactatttcaaatgaaattgagtctttgcaagcgaaagtaactgtacatgatgggttgattttgcaaattagaagtacagatttaaattaagtatattcaaatatgcgaagatttttaataaagtccatgagttatttaataaagtgacgtttatagtatagaatttatagcataataatagatgaatcacgctgtaattaatgaagattatggcgtgatttattattgaaaggaaaattgtaggtcctagtacattgatttatgtgccaaaatcgatattgaacccataagtccaatttgacagagaaccattattaaacgttttaaccaaattatattgatagttcgaatttcactatgaaccattatgtattgttttgtaacaaaaaagaactaagaggttgagctcttagttcttaagtaaatgcgtcctccacataaggtcacattttttatgtgcaatatatttattaaactctagttactttaccagattttaaagcacgtgcagaaacccaaacttttttaggtttaccgtcaactaggattctaactttttgaaggttagcgttccatctacgtttagtagagtttaaagcgtgtgaacgtctgttaccagtcgaagctttacgacctgttacgaaacattgtttacccatatgagtacctcctttaataaatataaatacacataactacttatatacttaattaagatagcatagtttcatttgaaaaacaatgaataattttcacataaaagtcaaaaatactgagttttgtgatataattgtagactgtgaagttatgtagtatgatattttagagaaataagtgaatgaaacatttaaactttttatttaatgatactacatctattaaaagaaaatgcctatacataatcgtcatgagtgtaaattcagtttactcaaaatataataggtgatttaagcgtaagtcattctgataagttgtaccattgatattttataaaaataatcaatgaaacttaaagcgtttatgactacactaagtggtaaaattttaaaagtgattagggaaaacgaataataaactttgaaatttaggagggacaaagatatgacattagagatttcaaatgattacggtaaaattgatatttcaaacgaagtgattgcttcggttgtaggtggaaaggccgttgaatgttatggtattgtaggtatggcatctagacaacaagttagagatggtattgcggaaatactaggacatgaaaattatgctaaaggcatcaaagtaactgaaaataatggcgtagtggatatagatatgtacattattgtaagttacggtgtgaaaatatctgaagttgccaataatgtacaatcaacagtgaaatatactttggaaaaatcacttaatgtatcagtaaattcaatcaatatatatgtacaaggtgtacgtgtgaataatacaggcaagaaagcttaggaggacaacttgaaatgattagcaaaattaatggtaaattatttgccgatatgattatacaaggggcacaaaatttatctaacaatgcagatttggtagattctttgaatgtgtatccagtgccagatggtgatacaggaacaaatatgaatcttactatgacttcaggtcgcgaagaagtagagaataatttgtcgaaaaatatcggcgaattaggtaaaacattctcgaaaggtttactaatgggtgcaagaggtaactctggtgtcatcttgtcacaattattcagaggattttgtaaaaatattgaaagtgaatctgaaattaattcaaaattgttagctgaaagttttcaagctggtgttgaaacggcatataaagctgttatgaaaccagttgaaggtacaatacttacagttgcaaaagatgctgcgcaagctgcaatagaaaaagcaaataatactgaagattgtatagaattaatggagtacattattgtaaaagccaatgaatcacttgaaaacacaccaaacttattagctgtacttaaagaagttggtgttgttgatagtggcggtaaaggtttgttatgcgtttacgaaggattcttaaaagcgcttaaaggtgaaaaagttgaagccaaagttgcaaagctagataaagatgaatttgtacatgatgaacatgatttccatggtgtaattaatactgaagatattatttatggctattgtactgaaatgatggttcgttttggaaagaataaaaaagcctttgatgaacaagaattcaggcaagatatgagtcaatttggtgattctttattagtcattaatgatgaagaaattgtgaaagttcacgtgcataccgaatacccaggtaaagtgtttaattatggtcaacaatatggtgaattaattaaacttaaggttgaaaatatgagagaacagcatcgtgaagtgattcgaaaagaacagcacacagctaaaccgaaaatggaaacggttgaaacagcaattattactatttctatgggtgaaggtatttcagagatatttaaatcaatgggtgccacacatatcattagtggtggacaaacgatgaatccttctacagaagatatcgttaaagtcattgaacaatcaaaatgtaaacgtgcaattattttaccgaataataaaaatatcttaatggcaagtgaacaagcagcgagtattgttgatgcagaagcagttgttattccaacgaaatctattcctcaaggtataagcgcactattccaatatgatgtggacgcaacacttgaagaaaataaagcgcaaatggctgattcagtaaataacgttaaatctggttcattaacgtacgctgttcgtgatacgaaaattgatggcgttgagattaaaaaagacgcgtttatgggcttgattgaagataagattgtaagcagccaaagtgatcaattaacaacggttactgagttgttaaatgagatgttagcagatgatagtgaaatattgactgtgattattggtcaagatgcagagcaagcagttacagataacatgataaactggattgaagagcaatatccagatgtagaagtggaagttcatgaaggtggacaaccaatttatcaatatttcttttcagtagaataaaaatttaaaataaaaaactaccaatgataaatcatcagttggtagttttttattttgctattttagtgatattgcgggttaaaagtatcgttctcgagttgctaacaatgtcatgttcaacttagtcatgataaaataaataacatactaaatgatacgtaaaatcaaataaaacataggtgatttattttggctaaagtaaacttaatagaaagtccatattctcttttacaattaaaaggtataggtcctaagaaaatagaagtattgcaacaactaaatattcatacagtggaagatcttgttctttatttgccaactagatatgaagataatacagtgattgatttgaatcaagcagaagatcaatctaacgttacgatagaaggacaagtatatacagctccagtagttgcattttttggaagaaataaatcaaaattaactgttcatttaatggtaaataatattgctgtcaaatgtatttttttcaatcaaccgtatttaaaaaagaaaatcgaattaaatcaaactataactgttaaaggtaagtggaatagggttaaacaggaaattactggtaatagggttttcttgaattcacaaggtacacaaactcaagaaaacgcagatgttcaattagaaccagtctatcgtattaaggaaggtattaaacaaaagcaaatacgagaccaaattagacaagcgttaaatgatgtgacaattcatgaatggttaactgatgaactaagagaaaaatataaattagagaccttggactttactttgaacacgttacatcatcctaaaagtaaagaggatttattacgtgctcgtagaacctatgcatttactgaactgtttttattcgaattacgtatgcaatggctaaatagattagaaaagtcatctgacgaagcaattgaaattgattatgacttagaccaagttaaatcatttattgatcgtttgccttttgaactaactgaagcacagaaatccagtgttaatgaaatttttagagatttaaaagcaccaatacgtatgcatcgattacttcaaggtgatgtaggttcaggaaaaacagtagttgctgcaatttgtatgtatgcgttaaaaacggctggttatcaatcagcattgatggtaccaactgaaattttagcagagcaacatgctgaaagtttaattgctttatttggagattctatgaatgttgcgttgttaactgggtcagtaaaaggtaagaaacgaaaaatacttttagaacaacttgaaaatcgtacgattgattgtttaattggaacccatgcattgattcaagatgatgtgattttccataatgttggtttagtaattacagatgaacaacatcgatttggtgtgaatcaacgccaacttttaagagaaaaaggtgcaatgacgaatgtgttatttatgacagcaaccccgataccaagaacactagcaatatcagtttttggtgagatggatgtgtcttcaattaaacaattaccaaaaggtcgtaaacctatcattactacttgggcaaagcatgagcaatacgataaagttttgatgcaaatgacctcagagttgaaaaaaggtcgtcaagcatatgttatttgcccgcttatagaaagttctgagcatctcgaagatgttcaaaatgttgtcgcattgtacgagtctttacaacagtattatggtgtttcccgtgtagggttattgcatggtaagttgtctgccgatgaaaaagatgaggtcatgcaaaagtttagcaatcatgagatagatgttttagtttctactactgttgttgaagtaggtgttaatgtaccgaatgcaacttttatgatgatttatgatgcggatcgctttggattatcaactttacatcagttacgcggtcgtgtgggtagaagtgaccagcaaagttactgtgttttaattgcatcccctaaaacagaaacaggaattgaaagaatgacaattatgacacaaacaacggatggatttgaattgagtgaacgagacttagaaatgcgtggccctggagatttctttggtgttaaacaaagtggattgccagatttcttagttgccaatttagttgaagattatcgtatgttagaagttgctcgtgatgaagcagctgaacttattcaatctggcgtattctttgaaaatacgtatcaacatttacgtcattttgttgaagaaaatttattacatcgcagttttgactaattaccatgctgatttgtcaatttaagtgcaacacttcgttaattgagtgatatgacacttgaactatttaaatgtaaagtggtattttaaaatttataaattttcgactaaataatagctaaataatacagttatttgttgagtcggttaaatagaaagtgttatgatatgtgaggaatgtttaagactaggtactaaaaaatgaggggtgagacgttgaaactaaagaaagataaacgtagagaagcaatcagacaacaaattgatagcaatcccttcatcacagaccatgaactaagcgacttatttcaagtgagtatacaaacaattcgtttagatcgcacttatttaaacataccagaattaaggaagcgtattaaattagttgctgaaaaaaattatgaccaaataagttctattgaagaacaagaatttattggtgatttgattcaagtcaatccaaatgttaaagcgcaatcaattttagatattacatcggattctgtttttcataaaactggaattgcgcgtggtcatgtgctgtttgctcaggcaaattcattatgtgttgcgctaattaagcaaccaacagttttaactcatgagagtagcattcaatttattgaaaaagtaaaattaaatgatacggtaagagcagaagcacgagttgtaaatcaaactgcaaaacattattacgtcgaagtaaagtcatatgttaaacatacattagttttcaaaggaaattttaaaatgttttatgataagcgaggataaaattatggttaaattagcaattgatatgatgggtggcgacaatgcgcctgatatcgtattagaagccgtacaaaaggctgttgaagactttaaagatctagaaattatacttttcggtgacgaaaaaaagtataatctgaaccatgaacgaatcgaatttagacattgttctgaaaagattgaaatggaagatgagcctgttagagcgattaaacgtaaaaaagatagctcaatggtaaaaatggctgaagctgtgaaatctggtgaggcagatggatgtgtgtcagcaggtaatactggtgctttaatgtcagctggtttattcattgttggacgtattaaaggtgtagctagaccggctttagtagtaacattgccaacgattgatggaaaaggttttgtctttttagacgttggtgcaaatgctgatgctaagcctgaacacttattacagtatgcgcaactaggggatatttatgctcaaaaaattagaggtattgataatccgaaaatctcattattaaatataggtaccgagccagctaaaggtaatagtttaacgaaaaaatcatatgagttattaaatcaagatcattcattgaattttgttgggaatattgaagcgaagacattaatggatggcgatacagatgttgtagttaccgatggctatactgggaacatggtccttaaaaatttagaaggtactgcaaaatcaatcggtaaaatgttaaaagatacgattatgagtagtactaaaaataaaatagcaggtgcaatattgaagaaagatttagcagaattcgctaaaaagatggattactcagaatacggtggttccgtattattaggattggaaggtaccgtagttaaagcacacggtagttcaaatgctaaagctttttattctgcaattagacaagcaaaaatagcaggagagcaaaatattgtacaaacaatgaaagagactgtaggtgaatcaaatgagtaaaacagcaattatttttccgggacaaggtgcccaaaaagttggtatggcacaagatttatataacaacaacgatcaagcaactgaaattttaacttcagcagcaaacacattagactttgatattttagagacaatgtttactgacgaagaaggtaaattgggtgaaactgaaaacacgcaaccagctttattgacgcatagttcggcattattagcagcactaaaaaatttgaatcccgattttactatggggcatagtttaggtgaatattcaagtttagttgcagctgacgtattatcatttgaagatgcagttaaaattgttagaaaacgtggtcaattaatggcgcaagcatttccttctggtgtaggaagcatggctgcagtattgggcttagattttgataaagttgatgaaatttgtaagtcattatcatctgatgacaaaataattgaaccagcaaacattaattgcccaggtcaaattgttgtttcaggtcacaaagctttaattgatgagctagtagaaaaaggtaaatcattaggtgcaaagcgtgtcatgcctttagcagtatctggcccattccattcatcgctaatgaaagtgattgaagaagatttttcaagttatattaatcaatttgaatggcgtgatgctaagtttcctgtagttcaaaatgtaaatgcgcaaggtgaaactgacaaagaagtaattaaatctaatatggtcaaacaattatattcaccagtacaattcattaactcaacagaatggctaatagaccaaggtgttgatcattttattgaaattggtcctggaaaagttttatctggcttaattaaaaaaataaatagagatgttaagttaacatcaattcaaactttagaagatgtgaaaggatggaatgaaaatgactaagagtgctttagtaacaggtgcatcaagaggaattggacgtagtattgcgttacaattagcagaagaaggatataatgtagcagtaaactatgcaggcagcaaagagaaagctgaagcagtagtcgaagaaatcaaagctaaaggtgttgacagttttgcgattcaagcaaatgttgccgatgctgatgaagttaaagcaatgattaaagaagtagttagccaatttggttctttagatgttttagtaaataatgcaggtattactcgcgataatttattaatgcgtatgaaagaacaagagtgggatgatgttattgacacaaacttaaaaggtgtatttaactgtattcaaaaagcaacaccacaaatgttaagacaacgtagtggtgctatcattaatttatcaagtgttgttggagcagtaggtaatccgggacaagcaaactatgttgcaacaaaagcaggtgttattggtttaactaaatctgcggcgcgtgaattagcatctcgtggtatcactgtaaatgcagttgcacctggttttattgtttctgatatgacagatgctttaagtgatgagcttaaagaacaaatgttgactcaaattccgttagcacgttttggtcaagacacagatattgctaatacagtagcgttcttagcatcagacaaagcaaaatatattacaggtcaaacaatccatgtaaatggtggaatgtacatgtaatatatttgagctaaagctcattgacgcagtggttgactggtcatccaatggagaaatgcctgacctagtcaactttgcgggggaaattctaagcaaccaagatatggttccagaatttctccctaagaaacagtaatcaataaattgataactaataagcggaacgcctgagctaaagctcatgcataagaaacagtaatcaataaattgataactgtttctaaaatttctacttgttttttagaatttaaaatgggaaaatataatagtctatgtataggcatttttaaaggaggtgaatcgacgtggaaaatttcgataaagtaaaagatatcatcgttgaccgtttaggtgtagacgctgataaagtaactgaagatgcatctttcaaagatgatttaggcgctgactcacttgatatcgctgaattagtaatggaattagaagacgagtttggtactgaaattcctgatgaagaagctgaaaaaatcaacactgttggtgatgctgttaaatttattaacagtcttgaaaaataataaatcttacatctgggtcgtcagtattgtcgactcagtttttttctttaattatcaatagttttaacgtaaaattaaagatgattcaagagcaacacataaaggagataaaataatgtctaaacaaaagaaaagtgagatagttaatcgttttagaaagcgctttgatactaaaatgacagagttaggctttacttatcaaaatattgatttataccaacaagcattttcgcattcgagttttattaatgattttaatatgaatcgtttagaccataatgagcgtttagagtttttgggtgatgcggtattagaattgacggtttcacgatatttatttgataaacatcccaacttgccagaagggaatttaacaaaaatgcgtgccactattgtatgtgagccctcacttgtaatatttgcgaataaaattggattgaacgaaatgattttacttggtaaaggtgaagagaaaacaggggggcgtacaagaccatcattaatatcagacgcattcgaagcatttattggggcattgtatttggatcaaggactagatatagtttggaaatttgctgagaaagtcattttcccacatgtagaacaaaatgagttattaggcgtggtagattttaaaacacaattccaagaatatgtgcaccagcaaaataaaggtgatgtaacctataatttaataaaagaagagggaccggcacatcatcgtctattcacttcagaagttattctgcaaggggaagcaatagctgaaggtaaagggaaaacgaaaaaagaatcagaacaacgcgctgctgaaagtgcctataagcaattaaagcaaattaaatagaaatttatatgatacgacatataggtgttcgatttaggatttatggaagaatttttaatattttatggaacaacttcgaaatttaatatacaaatactaaaatatcgtatacatgtgttctttaaaattgtgataaggagtttaggatggtttatttaaaatcaatagatgccattggatttaagtcttttgcagatcaaaccaatgttcaattcgataaaggtgtgactgcaattgttggtccaaatggaagcggtaaaagtaatattacagatgctattaaatgggtgttgggtgaacaatcggctaaatcattacgtggctcaaaaatggaagatattatcttctcaggtgcagaacatcgcaaagctcaaaattatgctgaagtacagttaagattagataatcattctaaaaagctcagtgttgatgaaaacgaagttattgtaacaagaagattgtatcgaagtggtgaaagtgagtactacataaataatgaccgtgcaagattaaaagatattgccgatttatttttagattctggattggggaaagaagcatatagcattatctcgcaaggtagagttgatgaaatactaaatgctaaaccaattgatagacgtcaaattattgaagaatcggctggtgtacttaaatataaaaaacgtaaagctgaatcattaaataaacttgaccaaacagaagataatttaacgagagtagaagacattttatatgatttggaaggtcgcgtagaacctctaaaagaggaggcagctatagctaaagaatataagacactttcacaccaaatgaaacatagtgacattgtagttacagtgcacgatattgatcaatatacaaatgacaatagacaattagatcaacgtttaaatgatttacaaggtcaacaagcaaataaagaagctgacaagcaacgtttaagccaacaaattcaacaatataaaggtaagcgtcatcaacttgataatgatgttgaatcgcttaattatcaattagtaaaagctacggaagcctttgaaaaatatacgggacaattaaatgttttagtagaacgtaagaaaaatcaatctgaaacaaatgcacgatatgaagaagaacaagaaaatttaattgagcttttagaaaatatatcaagtgagatttctgaagctcaagatacttataagtctctgaaaagtaaacaaaaagaactcaatgctgtcattcgtgaacttgaagaacaactatatgtttcagacgaagcacacgatgaaaaattggaagaaattaaaaacgaatactatacattaatgtcagagcaatcagatgttaacaatgatattcgttttttaaagcatactatagaagagaatgaggttaaaaaatcaagactagattctcgattagttgaagtctttgagcaattgaaagatattcagggtcaaataaaaacgactaaaaaagaatatcaacagaccaacaaagaactttctgctgtagataaagaaattaaaaatatagaaaaagacctcactgatacaaaaaaagcacaaaacgaatacgaagagaaattgtatcaagcatatcgatataccgaaaaaatgaaaacacgtattgatagtttggcaacgcaagaggaagaatatacttattttttcaatggcgtcaaacatattttgaaagctaaaaataaagaattaaagggtattcatggtgcagttgcggaaattattgatgtgccatctaaattaactcaggcaattgaaacagcattaggtgcttcattacaacatgtcattgtagattcagaaaaagatggacgccaggctattcaatttttaaaagaacgtaatttaggtcgtgcgacgtttttaccattaaatgttatacagagtagagcggtagcgactgatattaagtctattgctaaagaggcaaacggatttattagtattgcttcggaagcagttaaagtagcaccagaatatcaaaatattatcgggaatttattaggtaatacgattatcgttgatcatttaaagcatgcaaatgaattggcacgtgcgattaaatatcgaactcgtattgttactttggaaggtgatattgtaaatcctggtggttctatgactggtggtggcgctcgtaagtcaaaaagtattctgtctcaaaaagacgagttgacaacaatgagacaccaattagaagattacttgcgtcaaacagaatcatttgaacaacaatttaaagagttgaagataaaaagtgatcaattaagtgaactgtattttgaaaaaagtcaaaagcataatacacttaaagagcaagtgcatcattttgaaatggagctcgatagattaactacacaagaaacacaaataaaaaatgatcatgaagaatttgaatttgaaaaaaatgatggttatacgagtgacaaaagtcgacaaactttgagtgaaaaagaaactcatttagaaagtattaaagcatctttaaaacgactagaagatgaaattgaacgctacacaaaactttctaaagaaggtaaggaaagcttaactaaaacacaacaaacgttacatcagaaacaatctgatcttgctgtggttaaagagcgtattaaaacacaacaacagacaatagatcgattaaataatcaaagtcaacaaaccaaacatcaattaaatgatgttaaagaaaaaatagcattctttaattcggatgaagtgatgggcgaacaagcttttcaaaatattaaagatcaaattaatggtcaacaagaaacgagaacacgcttatctgatgaattagataaattgaaacaacaacgtattgagttgaatgaacaaatcgatgcgcaagaagctacactacaagtttgtcaccaagatattttagctatcgaaaatcactaccaagatattaaagctgaacaatcaaagctagatgtattaattcatcatgcgatagatcatttaaatgatgaatatcaattgactgttgaacgtgcaaaatctgaatatacgagtgatgaatcgattgacgcattacgtaaaaaagttaaattaatgaagatgtcgattgatgaactaggtcctgtaaacttaaatgcaattgaacaatttgaagagttaaatgaacgttatacatttttaagtgagcaacgtacagatcttcgtaaagctaaagaaacattagagcaaattataagtgaaatggatcaagaggttactgaaagatttaaagaaactttccatgctattcaaggacattttacagctatgttcaaacaattgtttggtggaggcgatgcagaattgcaattaactgaagccgattatttaacagctggtattgatattgtggtacaaccaccgggtaaaaagttgcaacatttatcgttactaagtggtggtgagcgtgcattaactgctattgctttactatttgcaattttaaaagtaagatctgcaccttttgttatattagatgaggttgaagctgcattagatgaagcgaatgttattagatacgcaaaatatttaaatgagttatcagacgaaacacaattcattgttattacacaccgtaaaggaacaatggaatttgcagataggttatacggtgtaacaatgcaagaatcaggtgttactaaacttgtgagtgtgaatttaaatacaatagatgatgtgttgaaggaggagcaataatgagcttttttaaacgcttaaaagataagtttgcaacaaataaagaaaatgatgaagttaaatccttaacagaagaacaaggtcaagacaaattagaagatacacattctgaaggttcaacgcaggacgtaaatgatttagcagaaaatgctgaagtgaaaaagaagccacgcaagttgagtgaagcggattttgatgacgatggcttaatatcaattgaagattttgaagaaattgaagctcaaaaaatgggtgctaaatttaaagcaggactcgaaaaatctcgtcaaaatttccaagaacaattaaataatttgatagcgagatatcgtaaagtagatgaagacttttttgaagctttagaagaaatgttaatcactgcagacgtcggttttaatacagtgatgacgttaactgaagaattacgtatggaagcacaacgacgtaatattcaagatactgaagatttgcgtgaagtcattgttgaaaaaatcgtagagatttaccatcaagaagatgataattcagaagctatgaacttagaagatggtcgtttaaatgtcattttaatggttggtgtgaatggtgttggtaaaacaacaacaattggaaaattagcttaccgatataaaatggaaggtaaaaaagtaatgttagctgcgggcgatacttttagagcgggtgctattgatcaattgaaagtttggggcgaacgtgttggtgtagatgtaattagccaaagtgaaggttctgatccagctgctgttatgtatgatgcgattaatgccgctaaaaacaaaggtgttgatattttaatctgtgataccgctggacgtttacaaaataaaacaaatctaatgcaagaattagaaaaagttaagcgtgtaattaatcgagcagtgccagatgcgcctcatgaagcattactatgtttagatgctacaactggtcagaatgcgttgtcacaagctagaaactttaaagaagtaacaaatgttacaggtattgtattaacgaaattagatggtacagccaaaggtggtatcgtattagccattcgtaatgaattgcacattccagttaaatatgtaggtttaggtgagcaattagatgacttacaaccatttaaccctgaaagttatgtctacggcttattcgctgatatgattgaacaaaatgaagaaataacaacagttgaaaatgatcaaattgtaacagaagaaaaggacgataatcatggggcaaaatgatttagttaaaacgttacgaatgaattatttgtttgatttttatcaatccttattgacgaataaacaacgtaattatttggaattattttatctcgaagattattctttaagtgaaatcgcagatacttttaatgtgagtagacaagcagtttatgataatataagaagaactggcgatttagttgaagattatgaaaagaaattggaattataccagaaatttgagcaacgccgagaaatatatgatgaaatgaaaaaacatttaagtaatccagaacaaatacaacgttatattcaacaattagaagacttagaatagatataaattgagggaggacatcgatatggcatttgaaggcttatcagaacgcctgcaagcgacgatgcaaaaaatgcgtggtaagggtaaacttactgaagctgatataaagataatgatgcgtgaagtaagattagcgttacttgaggctgacgtaaactttaaagtggtaaaagaatttattaaaacagtatcagaacgcgcattaggttccgatgtaatgcaatcattaacaccagggcaacaagttattaaaatagttcaagatgaattaacgaagttgatgggtggagaaaatacatcgattaatatgtcaaataaaccacctactgttgttatgatggttggtttacaaggtgctggtaaaacaacaactgcaggtaaattagcattattgatgcgtaaaaaatacaacaaaaaaccaatgttagttgcagcagatatttatcgtccagcagcgataaatcaattacaaacagtaggaaaacaaattgatattcctgtatacagtgaaggggatcaagtaaagccacaacaaattgtaactaatgcattaaaacatgctaaagaagaacatttagactttgtaatcattgatacagcaggtcgattacacatcgatgaagcattgatgaacgaattaaaagaagtaaaagacattgctaaaccaaacgaaattatgttagttgtcgattcaatgacgggtcaagatgctgtcaatgttgcagaatcatttgacgatcaacttgatgtcacaggtgttaccttaactaaattagatggtgatacacgtggtggtgtagctttatctattcgttcggtgacacaaaaaccaattaaatttgttggtatgagtgaaaagttagatggtttagagctattccatcctgaacgtatggcatcacgtattttaggtatgggtgatgtgttaagtttaattgaaaaagcacaacaagatgtggatcaagaaaaagcaaaagatttagagaaaaagatgcgtgagtcatcatttactttagatgattttttagaacaacttgatcaggtgaaaaatttaggaccactggatgatattatgaaaatgattccaggtatgaataaaatgaaagggctagataagcttaatatgagtgaaaagcaaattgatcatattaaagcgattatccagtcaatgacgccggctgaaagaaacaatccagacacattgaatgtatcacgtaaaaagcgtattgctaaaggttctggacgttcattacaagaagtcaatcgtttgatgaaacaatttaacgatatgaagaaaatgatgaaacaattcactggtggcggtaaaggtaaaaaaggtaaacgcaatcaaatgcaaaatatgttaaaaggtatgaacttaccattttaatgtttaatttaacatgctgatttttgttgcaatgagatgtgcatcccgaaagttatactaaagaatataactttatggggtgcatatttttagatacacaataataattaaatactgaaattgctgatttgctagaacatgaggttattgttgctaatattaataagttatattgggagaacgtgtgcggtagaagtggtaccattcatgtccttacgggataaattaactaaacacgtatgtggtgaaggctactatgaatttttataacctattaacagtctaatttagtaatcacatagttatttttgtaaggaaaaggttcaataattttctaggtaaagaaaaaactctttacaaacattcacacacctgttaatattatttcttgtagaaaataaaaattaaaacatgacttaaaggagattttataaatggcagttaaaattcgtttaacacgtttaggttcaaaaagaaatccattctatcgtatcgtagtagcagatgctcgttctccacgtgacggacgtatcatcgaacaaatcggtacttataacccaacgagcgctaatgctccagaaattaaagttgacgaagcgttagctttaaaatggttaaatgatggtgcgaaaccaactgatacagttcacaatatcttatcaaaagaaggtattatgaaaaaatttgacgaacaaaagaaagctaagtaatttagcgtaaaattgttctaacaataagaataactcgtttacactgacagttattactcaatgatacgttgggaatatcacatgttagtaatatagaacgtattgggtaccataatggtgccctttttctttgaattattttcaattaaaatagaagtgttcaaagcatagagttggaggtaatagaatgagagttgaagttggtcaaattgttaacacacatggtattaaaggtgaaattaaagtaaaatccaattcagactttacagacgttcgttttcaacccggtcaagtgctgacagttgtgcataacaataacgaccttgaatatactgttaagtcacatagagtgcataaagggcttcatatgctcacatttgaaggtattaataatattaatgatattgagcatttaaaagggagttctatttatcaagagcgtgatcatgaagatatcgtacttgaggaaaatgaattttattattcagatattataggatgtacagtttttgatgatcaagaaacaccaataggtcgtgtaattaatatatttgaaacaggtgcgaatgatgtgtgggtgattaaaggatctaaagaatatttgattccttatattgctgatgttgtaaaagaagtggatgttgaaaataaaaaaattatcatcacgccaatggaaggattgttggattaatgaaaattgattatttaactttatttcctgaaatgtttgatggtgttttaaatcattcaattatgaaacgtgcccaagaaaacaataaattacaaatcaatacggttaattttagagattatgcaattaacaagcacaaccaagtagatgattatccgtatggtggcggacaaggtatggtgttaaagcctgaacctgtttttaatgcgatggaagacttagatgtcacagaacaagcacgcgttattttaatgtgtccacaaggcgagccattttcacatcagaaagctgttgaattaagcaaggctgaccacatcgttttcatatgcggacattatgaaggttacgatgaacgtatccgaacacatcttgtcacagatgaaatatcaatgggtgactatgttttaacaggtggagaattgccagcgatgaccatgactgatgctattgttagactgattccaggtgttttaggtaatgaacagtcacatcaagatgattcattttctgatgggttattagagtttccgcaatatacacgtccgcgtgaatttaagggtctaacagttccagatgttttattgtctggaaatcatgccaatattgatgcatggagacatgagcaaaagttgatccgcacatataataaaagacctgacttaattgaaaaatatccattaactaatgcagataagcaaatattagaaagatataaaataggattgaaaaaaggttagtattgtgctaacataatctgagtgtggaaacacaaaaatcactatgatccgctgctatatatttgtcgaggcaagaacataggttgaagaggagaatttataatgacaaatcacaaattaatcgaagcagtaactaaatcacaattacgtacagacttaccaagtttccgtcctggtgatactttacgtgtacacgtacgtatcattgagggtactcgtgagcgtatccaagtattcgaaggcgttgtaattaaacgtcgtggcggtggcgtttctgaaacgtttacagttcgtaaaatttcatcaggtgttggcgtggaacgtacattcccattacacacaccaaaaattgaaaaaatcgaagttaaacgtcgtggtaaagtacgtcgtgctaaattatattacttacgtagtttacgtggtaaagctgctagaatccaagaaattcgttaatcagcatttaaacaaagctatgtatgagtcaaattcgactcaatcaataaagccatctaggtcacttttatggagtgatatagatggctttttttgctgttttattaatgtaaagttgataatgtaattgtttttcccttctttattcataacgtgtttgctcaaaatggttatataaacaaaaatctactaagtgccatgaaaaaggacttagtagatttattaaatatgtgcgtagcaacattatttttgtcttgcccatctcgtgaaaataatactacatataatgccaaatatagtaattgttataagtaaataatagtatggtggggtatagctcaattgaatctttgttatatttttaggtgctttaatgccggtcataacaccatttacttgttcaactttaagactttgatcacctgatgtcgctttcataccttgattatatgctgttggcaaaacaatatacccagatgaatttttatttttagtaatagtataaccttgctttgtctttctaactttgacagcctctaatgaatttgaagcgtctttaagcgtggtataatcttcgccgtatatcccttttaaatttacacgatacttacctttaggcaatgataatctaattctatctgaagctttaatgcgtatcgttacgggtgttacaaagcgtcgatatttataagtgagtttatttctttcttgtgtatattcattcactttaacatcatgagctttatccggcgaaagtaattctaaatccatttcaaaatacaaatctttaaattgattagaaactgattttggcaactgtacagttagaccaccattattttgtttaacttgtaataaatgttttgtaggagattgccaggctgcactatttaatttaattgttgaatctgatagtaaatttttattggctttaaaatgtgtattaacatctttagtattgttagaaacaatcccttgcaacattgcttgttctttatctaatggagattttaattctttattggaaaagaccttatttgtaatatgtgcacttggataatggatggtatttttagaatgaatccaacgaactttattgtctttgtgttcagagttaattttaaatccatatggtaagttgtcatcatgattcactctaattcgatcattaacattccaaagtgatagtaaattttgacgattgccaagtagtctataagtgctgtttttatcgattggcatattaatttggagtgtcttgtcataatattttaaaatgtctccattaaaaatactagaatataatgaaatgccattataatgatatataaatggtgaatttaatgcatagtctgacatataatcaatgcgattaaatgggcctgttgcatttttatttatcttttttataagctggtttacatagttactatggtaatcatgttgtttcaacgatgataatgattgttgataaggtttgattgccatatttttgttgttatctaaaatgacgatttgttgaatcataacgattaatactaatattgcaacggttaattttttataacgccataaactaaattttaaaataacagcaagcaccatttgcaggataatacctactataagtgcgagtgggtgtgtcggtgatagtaatacataaagtaatgcgatgatgcttactggtattgttctgattaaataatatttcatatttaatgttgataaatgttgaataaacaatccgcaaagagcacttgatgatagtgctaagatatacacccaacgcctttctggaaatgaaaaaccattaaaagcactgtcaaaatactgtgataatgaaccaataaataatacccatgttactattgcgaaaagtctataaaagtaaaaacgatacagtttgaatgacaataatgcaacgatagtgagaattgaaatcgtaatgaaaaatccatcgctaaagaaaaaataatgataatcaagtggtgtcaaaaacggtatatcaacattgggattttgctttctgtcattttccaaaaacgcagaaatgccagtgaataaaccaaatacacttgataacacactcaaaactgtagcagatatgacgcaaattaatttttgtgttctagagacaatgtcatatttgtaagtgaaaatgagtcgatataaatagtagcaacctataataatagcttgataataactgaaataaaaattgctaaatagtgttaaggctatcgcaacaatgaaaataccgattttgcgttgttgaaaatatctttccaaaccaagaatcgataatggcaataaatataataaatttccataaaatgaccaagtaaaattaaagtatataacgacagttgacatgccgtataaaatcgtagcgatcatatttgttgagcgtttaaagtgtaatattttaaataagtagaaggtcacgacaaatgttatgatagctcgtaccatagccataataagttggtttgtcggccaaaaatgtattgttgtcggattaaatataccaacagtttctcctattttaatgaatagaaaattgagccacattaaaggtgacagcgaataataatatgatagtcctttcatataatcgccacctaatccaaacgatgcatcatataaactagaaaaactacttagatgttcatacaaatacatttgaaatggcatcatttgacggaatccatctccagatccactaaaaacagtaccattcacaatatattcatagatatgagtagaaaataaaataagcgttaatattacgctcatgaaagttatgaccaagaattgtttgacgtttgaatttaaccatttttttaacacaacattatcctcaactttcaaatttaaaattaagtttaactgaaactaaagttaatgaggttctcgataggtaaagacaaagatgactgtggaacagataccttatcatagttacttaaactttggattatttttagtttatcattaaacaaatatattgaataataaaaatgtcatactgtattaattgaatatcacctaataagcagcttagatttaataaatgataatttttaattagagaaaacttggaataatcacttataccttaatctaaagcattgttaagaagtgtgacaatgttaaaataaatatagttgaattaatgaatttgttctataattaacaagttatagattttaataatgagaaaagaattgacgaaagtaaggtgaattgaatggttattcaatggtatccaggacatatggcgaaagccaaaagagaagtaagtgaacaattaaaaaaagtagatgtagtgtttgaactagtagatgcaagaattccatatagttcaagaaaccctatgatagatgaagttattaaccaaaaaccacgtgttgttatattaaataaaaaagatatgtctaatttaaatgagatgtcaaaatgggaacaattttttattgataaaggatactatcctgtatcagtggatgctaagcacggtaaaaatttaaagaaagtggaagctgcagcaattaaggcgactgctgaaaaatttgaacgtgaaaaagcaaaaggacttaagccaagagcgattagagcgatgattgttggaattccaaatgttggtaaatccacattaataaataaactggcaaagcgtagtattgcacagactggtaataaaccaggtgtgaccaaacaacaacaatggattaaagttggtaatgcattacaactattagatacaccagggattctttggcctaaatttgaagatgaagaggtcggtaagaagttgagtttaacaggcgcgattaaagatagtattgtgcacttagatgaagttgccatctatggactgaactttttaattcaaaatgatttagcgcgcttaaaagcacattataaaatcgaagttcctgaagatgcagaaatcatagcgtggtttgatgcgatagggaaaaaacgtggcttaattcgacgtggtaatgaaattgattacgaagcagtcattgaactgattatttatgatattcgaaatgctaaaataggaaattattgttttgatatttttaaagatatgactgaggaattagcaaatgacgctaacaattaaagaagtaacgcagttgattaatgcggttaatacaatagaagaattagaaaatcatgaatgctttttagatgagcgaaaaggtgtacaaaatgccatagccagacgaagaaaagcgttagaaaaagaacaagctttaaaagaaaagtatgttgaaatgacttactttgaaaatgaaatattaacagagaatcctaatgctattatttgtggtattgatgaagttggaagaggacctttagcaggtccagtcgttgcatgcgcaacaattttaaattcaaatcacaattatttgggccttgatgattcgaaaaaagtacctgttacgaaacgtctagaattaaatgaagcactaaaaaatgaagttactgcttttgcatatggtatcgcgacagctgaagaaatagatgaatttaatatttataaagctactcaaatcgccatgcagcgagctattgatggattatcagtacaaccaacgcatttattgatagacgcgatgacgcttgataatgcactgcctcaagtatctttaatcaagggtgatgcaagaagtgtgtctattgcagctgcaagcatcatggcaaaggtttttcgtgatgattatatgacacagttatctaaagattatcctgaatatggttttgaaaaaaatgcgggttacggtaccaaacaacatttactagcaatcgatgatattggcattatgaaagagcatagaaaaagctttgaacctataaaatcgttactgtaaatcgtaaaattcaattaaatgataaaaaagtagcatttaagtttacaatagcgcttacattttttataattgtaagggaacttaacctaagtaacaggaggatggaagatgaatatccacgagtatcaaggtaaagaaatatttcgttcaatgggcgttgcagttccagaaggacgagtagcatttactgctgaagaagcggtggagaaagcaaaagaattaaattctgatgtatatgttgtgaaagcacaaattcatgctggaggtagaggtaaagcaggcggagtaaaaattgctaaatctttatctgaggtagaaacatatgcaaaagaattattagggaaaactttggtgacacatcaaactggtccagaaggtaaagaaattaagcgtttatatatcgaagaaggttgtgctattcaaaaagaatattacgttggattcgttattgatcgtgcgactgaccaagtaacattgatggcgtctgaagaagggggcactgagattgaagaagttgctgcgaagactcctgaaaagatcttcaaagaaactatcgatccagtaatcggactttcaccattccaagcaagacgaattgcgtttaatattaatattcctaaagaatctgttaacaaagctgctaaattcttattagcactttataatgtattcattgaaaaagattgttcaatcgtagaaatcaacccattagttacaacagctgatggtgatgtattggcattagatgctaaaattaattttgatgataatgcattattcagacataaagatgttgtagaattacgtgatttagaagaagaagatccgaaagagattgaagcgtctaaacatgatttatcatacattgcattagatggtgacatcggatgtatggttaatggtgcaggtttagccatggcaacaatggatacgattaatcatttcggtggaaacccagccaatttcttagatgcaggcggaagcgctactagagaaaaagtaactgaagcatttaaaatcattttaggtgatgaaaatgttaaaggtatttttgtaaacattttcggtggcattatgaaatgtgatgttatcgcagaaggtatcgttgaagctgtaaaagaagtagatttaactttaccactagttgtacgcttagaaggtacaaatgttgagttaggtaaaaaaatcttaaaagactcaggattagcaattgaaccagcagcaacaatggctgaaggtgcacaaaaaattgttaaactagtcaaagaagcataaggaaaggatgggagcactaagatgagtgtatttatagataagaatactaaagtaatggtacaaggtattacagggtctactgcccttttccatacaaaacaaatgcttgattatggtacgaaaatagtagcaggtgtgacgcctggtaaaggtggtcaagttgttgaaggcgttcctgttttcaacactgttgaagaagctaaaaatgaaactggggcaacggtttcagtcatttacgttccagcaccatttgctgcagactcaattttagaatcagctgatgcagacttagatatggttatttgtatcactgaacatattcctgtattagacatggttaaagttaaacgctatttacaaggtagaaaaacacgtttagttggtccaaactgtccaggtgtgattacagcagatgaatgtaaaattggtattatgcctggctatattcacaaaaaaggtcatgttggtgtagtatcacgttcaggtacactaacatatgaagcagtgcaccaattgactgaagaaggtattggtcaaactacagctgttggtattggtggagacccagtaaatggcacaaactttattgatgttttaaaagcattcaatgaagatgacgaaacgaaagcagttgttatgattggtgaaatcggtggtacagctgaagaagaagcagctgaatggattaaagcgaatatgacaaaaccagttgtaggctttatcggtggacaaacagcacctcctggaaaacgtatgggacatgctggtgcgatcatttcaggtggtaaaggtactgctgaagagaaaattaaaacattaaatagttgtggtgtgaaaacagcggcaacaccttcagaaattggttcaacattaattgaagctgctaaagaagcaggtatttatgaattattattaacagttaataaataaagttaaaagatgatataaatggctatagcccattccatactttataaaagtatcggaaatgggctatttgtcgtgcgatgaatttaagtacacttttcatattttgaaaaggcaagttaattattttacctccttcaatagctttctaaaacaaagcaaatttttattaaaatatatagtgtgctatgttataatatttatatattattgtaaggagtgtttcatcatgaataaacaacaaagtaaagtacgctattcaattagaaaagttagtattggaattttgtcaatttcaataggtatgtttttggcattgggtatgtcgaacaaagcatatgcagatgaaattgataaatctaaagattttacaagagggtatgagcaaaatgtattcgcgaaatcagagttaaatgctaataaaaatacgacaaaagacaaaataaaaaatgaagctgttgttaaaacatcggacacaagtttaaagttagacaacaaatcagcaatttcaaatggaaatgaaattaatcaagatatgaagatttcaaatactccgaaaaactcaaaccaaggtaacaatctagttgttaataacaatgaacctactaaagaaattaaaattgcaaacttggaagctcaaaattctaatcagaagaaagtgaataaaggtactaataattactttggttactacagttttagagaagctccaaaaacacaaatctatactgtaaaaaaggtgacacacttagtgctatagcattaaaatacaaaactacagtttcaaatattcaaaatacaaataatatagcaaatcctaatttaatatttattggtcaaaaattaaaagtgccaatgacaccattagtagaaccaaaaccaaaaacagtgccttcaaataataaaagtaatagtaataacagtacattaaattatttgaaaacattagagaatagaggatgggatttcgacggtagttatggatggcaatgtttcgatttagtcaatgtgtattggaatcatctttatggtcatggattaaaaggatatggagctaaagatataccatatgcaaataattttaatagtgaagctaaaatttatcacaacacaccaactttcaaagctgaacctggggacttagtggtttttagtggaagatttggtggaggatatggtcatacagctattgtcttaaatggtgattatgatggaaaattaatgaagttccaaagtttagatcaaaactggaataatggtggatggcgtaaagcagaggttgcacataaagttgttcataattatgaaaatgatatgatttttattagaccatttaaaaaagcataatttaaatcgaaggcaggacattgaaatatgaaattttcaactttaagtgaagaagaatttaccaactacaccaaaaagcacttcaaacattatacacagtctatagaattatataattatagaaataaaataaatcatgaagcacatattgtgggagtgaagaatgataaaaatgaagttatagctgcatgtttattaacagaggcacgtatttttaaattctacaaatatttctactctcatagaggtcctttacttgattatttcgatgctaaattagtttgttacttttttaaagaattatctaaattcatttataaaaatagaggtgtatttattcttgttgatccatatttaatagagaatttaagagatgcgaatggtaggataataaagaattataataattcagtgatagtaaagatgctaggaaaaattgggtatctccatcaaggttatacaacaggatattcaaataaaagccaaattaggtggatttctgtattggatttaaaagataaagatgagaatcaacttttaaaagaaatggaataccaaactagaagaaatataaaaaagactattgagattggtgttaaggttgaagatttatctattgaagaaacaaatcgattttataaattgtttcaaatggctgaagaaaaacatggttttcatttcatgaatgaagattattttaaacgaatgcaagaaatatataaagataaggcaatgttaaagatagcttgtatagatcttaatgaatatcaagataaattaaaaatacaattattgaaaatcgaaaatgaaatgatgactgtgaacagagcattaaatgaaaatccaaattctaaaaagaataaatctaaattaaatcagttaaatatgcaattatctagtattaataatagaattagtaaaaccgaagaactaatattagaagatggacctgttttggatttagctgctgctttatttatatgtactgatgatgaagtttattatctatcaagtggatcaaatcctaaatataatcagtatatgggcgcatatcatctacaatggcatatgataaaatatgcaaaatcacataatattaataggtataatttttatggaataacaggcgtctttagtgatgaggcggatgattttggtgtacaacaatttaaaaaaggttttaatgcacatgttgaagaattaattggtgatttcatcaaaccagtaagaccaattctatataaatttgcaaaacttatttataaggtttgattataaagtatgttggaaattgaaatttaaaattctttccaacatacttttcactttttaagtcggtattttactccttaaaataacattacatcgacaatgtttttgtattagaaatgtaaaacaaaaatagaatatgattttgtatgattaaaaaaaggagttgatttattgattagactatttttgcttaagttatactgggcacacttttcgactaaacaaattcatcaatttttaatggcataccctaatgtaattaaagaggggggcagaaaaaaagatagttatttatgtgaatgggtgaatagggaagaaaatgttcatttattacgtaaatactatgcttttataaaacttgatcataacgatattattaaagaactgcagaaattaaaagtaagttacattacatatatggatactgaatacccagtgctattaaaagaaatatatcaatttccattacttcttttctatagagggaacatcaaattaataaataatatgcatcatttggcagtagtaggtgcaagagattctacaagttatacccaacagtctttagaatttttattatcaaatgataaaagcaaatatttaacaattgtttccggccttgctcaaggagctgatgcaatggcacatcaaatagctttaaaatacaatctccctacaatagcagttttagcctttggccatcaaacacattatcccaaaagcacattagcattaagaaataaaatagaagaaataggtttagttatatccgaatatccaccacatacaccaattgctaaatatagatttcctgagcgcaatagaattatcagcggtttgtcaaaaggggttttaattactgaggctaaggaacaaagtggtagtcacatcacgatagattttgcattagagcaaaatagaaatgtttatgttttacctggatctatgtttaatcctatgacaaaaggtaatttattacgtatccaagaaggtgctaaggtagtattaaacgctaatgatatatttgaagactactatatttaaaactaaaaataacgagttgcttcatatttcttttgttaccctttgtaatttattttttaataaaatctataaaaaatagacagggaaaatgatttgtttagatataaaacgttgacaaaagcaaaattaagcgtttatcatttatctttagtaattagattagcgagggggaaatgacattggcagataatttagtcattgttgaatcgcctgcaaaagcaaaaaccattgaaaagtatttaggtaagaaatataaagttatagcttcaatgggacacgtcagagacttaccaagaagtcaaatgggtgtcgacactgaagataattacgaaccaaaatatataacaatacgcggaaaaggtcctgttgtaaaagaattgaaaaaacatgcaaaaaaagcgaaaaacgtctttctcgcaagtgaccccgaccgtgaaggtgaagcaattgcttggcatttatcaaaaattttagagcttgaagattctaaagaaaatcgcgttgttttcaacgaaataactaaagacgctgttaaagaaagttttaaaaatcctagagaaattgaaatgaacttagtcgatgcacaacaagcgcgtcgaatattagatagattagttggctataacatctcgccagttctatggaaaaaagtaaaaaaagggttgtcagcgggtcgagttcaatctgttgcacttcgtttagtcattgaccgtgaaaatgaaatacgaaactttaaaccagaagaatattggactattgaaggagaatttagatacaaaaaatcaaaattcaatgctaaattccttcattataaaaataaaccttttaaattaaaaacgaaaaaagatgttgagaaaattacagctgcattagatggagatcaattcgaaattacaaacgtgactaaaaaagaaaaaacgcgtaatccagcaaacccatttacaacttctacattacaacaagaggcggcacgtaaattaaactttaaagctagaaaaacaatgatggtcgcacaacaattatatgaaggtatagatttgaaaaaacaaggtacgattggtttaataacatatatgagaaccgattctacacgtatttcagatactgccaaagctgaagcaaaacagtatataactgataaatacggtgaatcttacacttctaaacgtaaagcatcagggaaacaaggtgaccaagatgcccatgaggctattagaccttcaagtactatgcgtacgccagatgatatgaagtcatttttaacgaaagaccaatatcgattatacaaattaatttgggaacgatttgttgctagtcaaatggctccagcaatacttgatacagtctcattagacataacacaaggtgacattaaatttagagcgaatggtcaaacaatcaagtttaaaggatttatgacactttatgtagaaactaaagatgatagtgatagcgaaaaggaaaataaactgcctaaattagagcaaggtgataaagtcacagcaactcaaattgaaccagctcaacactatacacaaccacctccaagatatactgaggcgagattagtaaaaacactagaagaattgaaaattgggcgaccatcaacttatgccccgacaatagatacgattcaaaagcgtaactatgtcaaattagaaagtaagcgttttgttcctactgagttgggagaaatagttcatgaacaagtgaaagaatacttcccagagattattgatgtggaattcacagtgaatatggaaacgttacttgataagattgcagaaggcgacattacatggagaaaagtaatcgacggtttctttagtagctttaaacaagatgttgaacgtgctgaagaagagatggaaaagattgaaatcaaagatgagccagccggtgaagactgtgaagtttgtggttctcctatggttataaaaatggggcgctatggtaagtttatggcttgctcaaacttcccggattgtcgtaatacaaaagcgatagttaagtctattggtgttaaatgtccaaaatgtaatgatggtgacgtcgtagaaagaaaatctaaaaagaatcgtgtcttttatggatgttcgaaatatcctgaatgcgactttatctcttgggataagccgattggaagagattgtccaaaatgtaaccaatatcttgttgaaaataaaaaaggcaagacaacacaagtaatatgttcaaattgcgattataaagaggcagcgcagaaataatatttttatttcctagagacattttaagattgttaaatagaatcattagtgaatcttattttaaagatagtaatggattaatctaaataagtgcggataatattaacataacaacataattaaaagacataaatgacaataaaaggagtatagaaatgactcaaactgtaaatgtaataggtgctggtcttgccggttcagaagcggcatatcaattagctgaaagaggaattaaagttaatctaatagagatgagacctgttaaacaaacaccagcgcaccatactgataaatttgcggaacttgtatgttccaattcattacgcggaaatgctttaactaatggtgtgggtgttttaaaagaagaaatgagaagattgaattctataattattgaagcggctgataaggcacgagttccagctggtggtgcattagcagttgatagacacgatttttcaggttatattactgaaacacttaaaaatcatgaaaatatcacagttattaatgaagaaattaatgccattccagatggatacacaattatcgcaacaggaccacttactacagaaactcttgcacaagaaatagtggacattactggtaaagatcaactttatttctatgatgcggctgctccaattattgaaaaagaatctattgatatggataaagtttacttaaagtcccgttatgataaaggtgaagctgcatatttaaactgtcctatgactgaggatgaatttaatcgcttttatgatgcagtattagaagctgaagctgcgcctgtaaattcatttgaaaaagaaaaatatttcgagggttgtatgccttttgaagtaatggcagaacgcggacgcaagacattactatttggaccaatgaaaccagtaggattagaagatccaaagactgggaaacgtccttatgcggtggttcaattaagacaagatgacgctgctggcacactctacaatattgtcggcttccaaacacatttaaaatggggagctcaaaaagaagtcattaaattaattccaggtttagagaatgttgatattgtcagatatggtgtgatgcatagaaataccttcattaactcaccggacgtattaaacgagaaatatgaattgatttcacaaccaaacatacagtttgcgggccaaatgactggtgttgaaggttatgtagaaagcgcagctagcggcttagttgcaggcatcaatcttgcgcataaaatattaggcaaaggtgaggtagtatttccgagagaaactatgattggaagtatggcttactatatttctcatgctaaaaacaataagaatttccaacctatgaatgctaacttcgggttattaccatctttagaaactagaattaaagataaaaaagaacgctatgaagcacaagctaatagagctttggattacttagaaaatttcaaaaaaactttataaaatagttagaaagactagatatgctattcattcttaagtcatcaacgagtaagtaatgactttctaaatggaaaatacttatcctagtctttttaattttggaattgttacgtatttctgacaatttagaattcgtattcaaataaatatctaaataaataacacgcaataagttgattgatgtaacatgtaagtgaatgttttaaataaagtttatttaaaagacaatgaaagaataaatagtaaggctattaataaagacttttagtaattaatttacaaaagaggtattctaattaacaggttttccgattagttacaattatttaattctcaaaagatttagaattgattatcaaattactgtaagccctttgctgtatatgctacaattcttattgatggagggtaaatgtattgaatcatattcaagaagcatttttaaatacattgaaagttgaacgaaatttttcagaacacacattgaaatcatatcaagatgacttaattcagtttaatcaatttttagaacaggaacatttacagttgaatacttttgaatacagagatgctagaaattatttgagctatttatattcaaatcatttgaaaagaacatctgtttctcgtaaaatctcaacgttaagaactttctatgaatattggatgacgcttgatgagaacattattaatccatttgttcaattagtacatccgaaaaaagaaaaatatcttccgcaattcttttacgaagaagaaatggaagcgttatttaaaactgtagaagaggacacttcaaaaagtttacgggatcgagttattcttgaattgttatatgctacaggtatccgtgtttcggaattagttaatattaaaaaacaagatatagatttttacgcgaatggtgttaccgtattaggaaaagggagcaaagagcgctttgtaccgtttggtgcttattgtagacaaagcatcgaaaattatttagaacatttcaaaccaattcagtcatgcaatcatgattttcttattgtaaatatgaagggtgaagcaatcactgaacgcggtgtacgatatgttttaaatgatattgttaaacgaacagcaggcgtaagtgagattcatccccacaagctcagacatacatttgcaacgcatttattgaatcaaggtgcagacctaagaacagtacaatcgttattaggtcatgttaatttgtcaacaactggtaaatatacacacgtatctaaccaacaattaagaaaagtgtatctaaatgcacatcctcgagcgaaaaaggagaatgaaacatgagtaatacaacattacatgcaacaacaatttatgctgtaagacataatgggaaagcagctatggctggagatgggcaagtaacgcttggtcaacaagtcatcatgaaacaaacggcaagaaaagtgcgtcgtttatatgaaggtaaagtgttagctggtttcgcaggtagtgtagcagatgcgtttacgttatttgaaaaattcgaaacaaaattacaacagtttagtggtaacttagaaagagctgctgttgaattggcacaagaatggcgaggcgataaacaattacgtcaattagaagctatgctaattgtaatggataaagatgctattttagttgtcagtggaactggcgaagttattgccccagatgatgaccttatcgctattggatcaggaggcaactatgcattaagcgcaggacgtgcattgaaacgccatgcatcgcatttgtctgctgaagaaatggcatatgagagcttgaaagtagcggctgatatttgtgtctttaccaacgataatattgttgtcgaaacactataataatcagagcatgataaataattatgagcaattaattttagttaaaagacggaggaatgaaattaatggatacagctggaataagattaactccaaaagaaatcgtatctaaattaaatgaatacatcgttggacaaaatgatgctaaacgtaaagtggcaattgccctacgtaatcgatacagaagaagtttattggatgaggaatcaaagcaagaaatttcacctaaaaatattttgatgattggaccaaccggtgttggtaaaactgaaattgcaagaagaatggccaaagttgtcggcgcaccatttataaaagtagaagctactaaatttactgaagtaggttatgtaggacgagatgttgaaagtatggttagagatcttgttgatgtttcagtaagattagtcaaggcgcagaaaaaatcattggtacaagatgaagcaacagctaaggccaatgaaaaacttgttaagttattagttccaagtatgaaaaagaaagcgtctcaaacgaataatcctttagagtcacttttcggaggtgcaattccaaatttcggacaaaataacgaagatgaagaagaaccacctactgaggaaattaaaacaaaacgttctgaaattaagagacaattagaagaaggaaaacttgaaaaagaaaaggtaagaattaaagtcgaacaagatcctggtgctttaggtatgctaggtacaaatcaaaatcagcaaatgcaagagatgatgaatcaattaatgcctaaaaagaaagttgagcgagaagttgctgttgagacggcaaggaaaatcttagctgatagttatgcggatgaactaattgatcaagaaagcgctaaccaagaagcacttgaattagcagaacaaatgggtatcatctttatagatgaaatcgacaaagttgcgacgaataatcataatagtggtcaagatgtctcaagacaaggtgtgcaaagagatattttacctatacttgaaggtagcgttattcaaaccaaatatggtactgtgaatactgaacatatgctgtttataggtgctggagctttccatgtatctaagccgagtgacttgataccagaattgcaaggtcgttttccgattagagttgaacttgatagtttagcggtagaagattttgtaagaattttgacagaaccaaaattgtcattaattaaacaatatgaagcattgcttcaaacagaagaagttactgtaaactttaccgatgaagcaattactcgtttagctgagattgcttatcaagtaaatcaagatacagacaacattggtgcacgtcgacttcatacaattttagaaaagatgttagaagatttatcattcgaagcaccaagaatgccgaatgcagttgtagatattaccccacaatatgttgatgataaattaaaatcaatttcaacaaataaagatttaagtgcatttattctataaaaatatacaaaaggagaaaaattcatgagcttattatctaaaacgagagagttaaacacgttacttcaaaaacacaaaggtattgcggttgattttaaagatgtagcacaaacgattagtagcgtaactgtaacaaatgtatttattgtatcgcgtcgaggtaaaattttaggatcgagtctaaatgaattattaaaaagtcaaagaattattcaaatgttggaagaaagacatattccaagtgaatatacagaacgattaatggaagttaaacaaacagaatcaaatattgatatcgacaatgtattaacagttttcccacctgaaaacagagaattattcatagatagtcgtacaactatcttcccaattttaggcggaggagaaagattaggtacattagtacttggtcgagtacacgatgactttaatgaaaatgatttggtactaggtgaatatgctgctacagttattggtatggaaatcttacgtgagaagcatagtgaagtagaaaaagaagcgcgcgataaagctgctattacaatggcaattaattcattatcttattctgaaaaagaagcaattgaacatatctttgaagaacttggcggtacagaaggcctattaatcgcatcaaaagttgcagatagagttggtattactagatctgtaattgtaaatgcactacgtaaattagaaagtgctggtgtaattgaatcacgttctttaggaatgaaaggtactttcattaaagttaaaaaagaaaaattcttagatgaattagaaaaaagtaagtaaaacgatgagtctgggacataattcaatgtcctagtcataacgatgttatcttggcagtagtcaacgaaatgactttgatgattatgttgaagtcatttctttatttttgtctaattttcaatcaaattgatattccgcattaacatgatagaattacctttaaatttatgaaaaaatgcttgaaaaacatttgctttagacacggcattatgttatatttattttcggctataaagccaatacacacatatcaaacgtgattgtgtaaagggtgcaatatttgtatattgtctttacaatagtttgctatggaggtaattaaccaataggaggaatttataatggcagtaatttcaatgaaacaattactagaagcgggtgttcacttcggtcaccaaacacgtcgttggaacccaaaaatgaaaaaatatatcttcactgagagaaatggtatttatatcatcgacttacaaaaaacagtgaaaaaagtagacgaggcatacaacttcttgaaacaagtttcagaagatggtggacaagtcttattcgtaggaactaaaaaacaagcacaagaatcagttaaatctgaagcagaacgtgctggtcaattctacattaaccaaagatggttaggtggattattaactaactataaaacgatctcaaaacgaatcaaacgtatttctgaaattgaaaaaatggaagaagatggtttattcgaagtattacctaaaaaagaagtagtagaacttaaaaaagaatacgaccgtttaatcaaattcttaggcggaattcgtgatatgaaatcaatgcctcaagcattattcgtagttgacccacgtaaagagcgtaatgcaattgctgaagctcgtaaattaaatattcctatcgtaggtatcgttgacactaactgtgatcctgacgaaattgactacgttatcccagcaaacgacgatgctatccgtgcggttaaattattaactgctaaaatggcagatgcaatcttagaaggtcaacaaggcgtttctaatgaagaagtagctgcagaacaaaacatcgatttagatgaaaaagaaaaatcagaagaaacagaagcaactgaagaataatcaactgttgaatctgacttagatatagtttaaatgggtgataagatattaatgcttatcaccttttttaaaaagaaaatcaaggcaaattacaaatattcaattagagtattggcaatcttgcctataataatgctaaaattataatatataaaatgataacttattggaggaataatgaatggcaactatttcagcaaaacttgttaaagaattacgtgaaaaaactggcgcgggtatgatggattgtaaaaaagcgctaactgaaactgatggtgacatcgataaagcgattgattacctacgtgaaaaaggtattgctaaagcagctaaaaaagcagaccgtattgcggctgaaggtttagtacatgtagaaactaaaggtaacgacgcagttatcgttgaaatcaactctgaaacagactttgttgctcgtaacgaaggtttccaagagttagttaaagaaatcgctaatcaagtattagatacaaaagctgaaactgttgaagctttaatggaaacaactttaccaaatggtaaatcagttgatgaaagaattaaagaagcaatttcaacaatcggtgaaaaattaagtgttcgtcgttttgctatcagaactaaaactgataacgatgctttcggcgcttacttacacatgggtggacgcattggtgtattaacagttgttgaaggttcaactgacgaagaagcagcaagagacgttgctatgcatatcgctgcaatcaaccctaaatatgtttcttctgaacaagttagcgaagaagaaatcaaccacgaaagagaagttttaaaacaacaagcattaaatgaaggtaaaccagaaaacatcgttgaaaaaatggtgaaaggacgtttacgtaaatacttacaagaaatttgtgctgtagatcaagacttcgttaaaaaccctgatgtaacagttgaagctttcttaaaaacaaaaggtggaaaacttgttgacttcgtacgctatgaagtaggcgaaggtatggaaaaacgcgaagaaaactttgcggatgaagttaaaggacaaatgaaataatctgtcataaagtaaaacaaggaagaagacacctttaatgttgctttattaaaatgtaaatcattctaataaaacgacaactgtgtcttctttacttgtatatgttacatatattcacgatagagaggataagaaaatggctcaaatttctaaatataaacgtgtagttttgaaactaagtggtgaagcgttagctggagaaaaaggatttggcataaatccagtaattattaaaagtgttgctgagcaagtggctgaagttgctaaaatggactgtgaaatcgcagtaatcgttggtggcggaaacatttggagaggtaaaacaggtagtgacttaggtatggaccgtggaactgctgattacatgggtatgcttgcaactgtaatgaatgccttagcattacaagatagtttagaacaattggattgtgatacacgagtattaacatctattgaaatgaagcaagtggctgaaccttatattcgtcgtcgtgcaattagacacttagaaaagaaacgtgtagttatttttgctgcaggtattggaaacccatacttctctacagatactacagcggcattacgtgctgcagaagttgaagcagatgttattttaatgggcaaaaataatgtagatggtgtatattctgcagatcctaaagtaaacaaagatgcggttaaatatgaacatttaacgcatattcaaatgcttcaagaaggtttacaagtaatggattcaacagcatcctcattctgtatggataataacattccgttaactgttttctctattatggaagaaggaaatattaaacgtgctgttatgggtgaaaagataggtacgttaattacaaaataaatttagaggtgtaaaataatgagtgacattattaatgaaactaaatcaagaatgcaaaaatcaatcgaaagcttatcacgtgaattagcgaacatcagtgcaggaagagctaattcaaatttattaaatggcgtaacagttgattactatggtgcaccaacacctgtacaacaattagcaagcatcaatgttccagaagcacgtttacttgttatttctccatacgacaaaacttctgtagctgacatcgaaaaagcgataatagcagctaacttaggtgtcaacccaacaagtgatggtgaagtgatacgtattgctgtacctgccttaacagaagaacgtagaaaagagcgcgttaaagatgttaagaaaattggtgaagaagctaaagtatctgttcgaaatattcgtcgtgatatgaatgatcagttgaaaaaagatgaaaaaaatggcgacattactgaagatgagttgagaagtggtactgaagatgttcagaaagcaacagacaattcaataaaagaaattgatcaaatgattgctgataaagaaaaagatattatgtcagtataaaactaatatacaatgacatattaaaatgccagtattaaacgataatgtaacatttaaaatgggcatgtttaattaaatcaaagatgcatgtgataatttaaattcacaatgagcataaaaatggtgtttaaacaagttaattaaacatatactttataaataataggcattaggtatattgatataataaagttatgtaatttttaacctcagtatgtatgtcacatttctggtgtaaactgtaccgagtcagactttggtacagtttttttatttgcttattcaatgcattaaatgagtatgataaaatgataatgattgtttagtaacttatactatatgacagagatgatcaggctcggaggaaagaccatgtttaaaaagctaataaataaaaagaacactataaataattataatgaagaattagactcgtctaatatacctgaacatatcgctattattatggatggtaatgggcgatgggctaagaagcgaaaaatgcctagaattaaaggtcattacgaaggtatgcaaacaataaaaaaaattactagggtagctagtgatattggtgttaagtacttaactttatatgccttttccactgaaaattggtcaagacctgaaagtgaagtaaattatattatgaatttgcctgtcaatttcttaaagacatttttaccggaactaattgaaaaaaatgtcaaagttgaaacaattggatttactgataagttgccaaaatcaacgatagaagcaataaataatgctaaagaaaagacagctaataataccggcttaaaattaatatttgcaattaattatggtggcagagcagaacttgttcatagtattaaaaatatgtttgacgagcttcatcaacaaggtttgaatagtgatatcatagatgaaacatatataaacaatcatttaatgacaaaagactatcctgatccagagttgttaattcgtacttcaggagaacaaagaataagtaatttcttgatttggcaagtttcgtatagtgaatttatctttaatcaaaaattatggcctgactttgacgaagatgaattaattaaatgtattaaaatttatcagtcacgtcaaagacgctttggcggattgagtgaggagtagtatagtatgaaagttagaacgctgacagctattattgccttaatcgtattcttgcctatcttgttaaaaggcggccttgtgttaatgatatttgctaatatattagcattgattgcattaaaagaattgttgaatatgaatatgattaaatttgtttcagttcctggtttaattagtgcagttggtcttatcatcattatgttgccacaacatgcagggccatgggtacaagtaattcaattaaaaagtttaattgcaatgagctttattgtattaagttatactgtcttatctaaaaacagatttagttttatggatgctgcattttgcttaatgtctgtggcttatgtaggcattggttttatgttcttttatgaaacgagatcagaaggattacattacatattatatgcctttttaattgtttggcttacagatacaggggcttacttatttggtaaaatgatgggtaaacataagctttggccagtaataagtccgaataaaacaatcgaaggattcataggtggcttgttctgtagtttgatagtgcctcttgcaatgttatattttgtagatttcaatatgaatgtatggatattacttggagtgacattgattttaagtttatttggtcaattaggtgatttagtggaatcaggatttaagcgtcatttcggcgttaaagactcaggtcgaatactacctggacacggtggtattttagaccgatttgacagttttatgtttgtgttaccattattaaatattttattaatacaatcttaatgctgagaacaaatcaataaacgtaaagaggagttgctgagataatttaatgaatctcagaactccttttgaaaattatacgcaatattaactttgaaaattagacgttatattttgtgatttgtcagtatcatattataatgacttatgttacgtatacagcaatcatttttaaaataaaagaaatttataaacaatcgaggtgtagcgagtgagctatttagttacaataattgcatttattattgtttttggtgtactagtaactgttcatgaatatggccatatgttttttgcgaaaagagcaggcattatgtgtccagaatttgcgatcggtatggggccgaaaatttttagttttagaaaaaatgaaacactttacactattaggttattgcctgttggtggatatgttcgtatggcaggagatggcttagaagagccaccagtcgagcctggtatgaacgttaaaattaaactgaatgaagaaaatgaaataacacatatcatattagatgatcatcataagtttcaacaaattgaagcgatcgaagttaaaaaatgtgattttaaagatgacttattcatagaaggtatcactgcttatgataatgaaagacatcattttaaaattgctagaaagtctttctttgttgaaaatggtagcttagttcaaattgctccgagagacagacaatttgcacataaaaagccatggccgaaatttttaacattatttgcgggaccgttatttaactttatattagctttagttctatttattggtcttgcatattatcaaggtacacctacttctactgtagaacaagtcgcagataagtatccagctcaacaagcaggcttacaaaaaggcgataaaattgtccaaattggcaaatataaaatatctgaatttgatgatgttgataaggcgttagataaagttaaagataataagacgactgttaaatttgaacgtgatggtaaaacaaagtcagttgaattaacacctaaaaagaccgaaagaaaactgactaaagtaagttcagagacgaagtatgttctcggattccaaccagcgagtgaacatacactcttcaaaccaattgtatatggatttaaaagctttttaatcggtagtacttatattttttcagctgtagtaggtatgttggctagtatatttacgggcggattctcgtttgatatgttaaatggtccggttggtatttatcataacgtcgactcagttgttaaagcgggtatcattagcttaattggatacactgcgttattaagtgtaaacttaggtattatgaatttaattcctattcctgcactagacggtggtcgtattttatttgttatatatgaagcgattttcagaaaaccagttaataaaaaagcggaaacaacgattatcgctattggtgccattttcatggtcgttattatgatattagtaacgtggaatgatattcgacgatatttcttataatttaggaggataaataattatgaagcaatccaaagtttttataccaacgatgcgtgacgtgccatcagaagcagaagcacaaagtcatcgtttattattgaaagcgggtttgataaaacaaagtacaagtgggatttatagttatttaccgctagcaacacgtgtgttaaataatattactgcaattgtgcgacaagaaatggaacgtatcgattctgttgaaattttaatgccagcgttacaacaagctgaattatgggaagaatcaggacgttggggtgcatatggcccagaattaatgcgtttacaagatagacatggaagacaatttgcattaggtccaacacatgaagaattagttacatcaatagtaagaaatgaattgaaatcatacaaacaattaccgatgacattattccaaattcaatctaaattccgtgatgaaaagagaccacgttttggtttacttcgtggtcgtgaatttattatgaaagatgcgtattcattccatgctgacgaggcatcattagatcaaacgtatcaagatatgtatcaagcgtatagccgtatttttgagagagttggcattaacgcaagaccagtagttgcagattcaggtgctattggcggtagccatacacatgaatttatggcattaagtgctatcggtgaggatacaatcgtttacagtaaagaaagtgactatgctgctaacatcgaaaaagcagaagtcgtttacgaaccaaatcataagcatactactgtgcaacctatagaaaaaattgaaacaccaaatgttaagactgcgcaagaattggcagacttcttaggtagaccagtagatgaaatcgttaaaacgatgattttcaaagttgatggcgaatatattatggttttagtgcgtggacatcatgaaattaatgacattaaattaaaatcttatttcggcacagataatattgaattagcaacacaagacgaaattgttaatttagttggtgcaaatcctggttcactaggtcctgtaattgataaagagatcaaaatttatgcagataattttgtgcaagatttaaataatttagttgtcggggctaacgaagatggttatcacttaattaatgtaaatgtaggtagagacttcaacgttgatgaatatggcgatttccgttttattttagaaggcgaaaagttaagtgatggttcaggcgttgcacattttgctgaaggaattgaagttggtcaagtattcaaattgggtactaagtattcagaatcaatgaatgctacattcttagataatcaaggaaaagcccaaccgttaattatgggttgttacggtattggaatttctagaacgctaagtgcgattgttgaacaaaatcacgatgataatggtattgtttggcctaaatcagttactccatttgatttacatttaatttctattaatcctaagaaagatgatcaacgagaactagcggatgcactatatgctgaatttaatactaaatttgatgtgttgtacgatgatcgtcaggaacgtgctggtgtcaaatttaatgatgccgatttaattggtttaccactgcgaattgttgttggtaaacgtgcatcggaaggtattgtagaagttaaagaacgtttaacaggtgatagcgaagaagtccacattgatgacttaatgactgtcattacaaataaatatgataatttaaaataattaagatcgaatgaattataagagtaggaaaaagctgaaagaaatcagatgcttatgtcctgctcttattatttttgatataatgattattcgatgaaaaatgactgaagacatagtataattaaagataaatttgttttaacaatattatgattagccaaatataaagcatttaattttctatcattactatgctcacataatctaaatattgttcgaacacgtaaaagtaatttctatttaaggtggtaattgtcttggcaatgacagagcaacaaaaatttaaagtgcttgctgatcaaattaaaatttcaaatcaattagatgctgaaattttaaattcaggtgaactgacacgtatagatgtttctaacaaaaacagaacatgggaatttcatattacattaccacaattcttagctcatgaagattatttattatttataaatgcaatagagcaagagtttaaagatatcgccaacgttacatgtcgttttacggtaacgaatggcacgaatcaagatgaacatgcaattaaatactttgggcactgtattgaccaaacagctttatctccaaaagttaaaggtcaattgaaacagaaaaagcttattatgtctggaaaagtattaaaagtaatggtatcaaatgacattgaacgtaatcattttgataaggcatgcaatggaagtcttatcaaagcgtttagaaattgtggttttgatatcgataaaatcatattcgaaacaaatgataatgatcaagaacaaaacttagcttctttagaagcacatattcaagaagaagacgaacaaagtgcacgattggcaacagagaaacttgaaaaaatgaaagctgaaaaagcgaaacaacaagataacaacgaaagtgctgtcgataagtgtcaaattggtaagccgattcaaattgaaaatattaaaccaattgaatctattattgaggaagagtataaagttgcaatagagggtgtcatttttgatattaacttaaaagaacttaaaagtggtcgtcatatcgtagaaattaaagtgactgactatacggactctttagttttaaaaatgtttactcgtaaaaacaaagatgatttagaacattttaaagcgctaagtgttggtaaatgggttagggctcaaggtcgtattgaagaagatacatttattagagatttagttatgatgatgtctgatattgaagagattaaaaaagcgacaaaaaaagataaggctgaagaaaaacgtgtagaattccacttacatactgcaatgagtcaaatggatggtataccaaatattggtgcgtatgttaaacaggcagcagactggggacatccagccattgcggttacagaccataatgttgtgcaagcatttccagatgctcacgcagcagcggaaaaacatggtattaaaatgatatatggtatggaaggtatgttagttgatgatggtgttccgattgcatacaaaccacaagatgtcgtattaaaagatgctacttatgttgtattcgacgtcgagacaactggtttatcaaatcagtatgataaaatcatcgagcttgcagctgtgaaagttcataacggcgaaatcatcgataagtttgaaaggtttagtaatccgcatgaacgattatcggaaacgattatcaatttgacgcatattactgatgatatgttagtagatgcccctgagattgaagaagtacttacagaatttaaagaatgggttggcgatgcgatattcgtagcacataatgcttcgtttgatatgggcttcatcgacacgggatatgaacgtcttggatttggaccatctacgaatggtgttatcgatacattagaattatctcgtacgattaatactgaatatggtaaacatggtttaaatttcttagctaaaaaatacggtgtagaattaacgcaacatcaccgtgccatttatgatacagaggcaacagcttacattttcataaaaatggttcaacaaatgaaagaattaggcgtattaaatcataacgaaattaacaaaaaactcagtaatgaagatgcatataaacgtgcaagacctagtcatgtcacattaattgtacaaaatcaacaaggtcttaaaaatctatttaaaattgtaagtgcatcattggtgaagtatttctaccgtacgcctcgaattccacgttcattgttagatgaatatcgtgagggattattggtaggtacagcgtgtgatgaaggtgaattatttacggcagttatgcagaaggaccagagccaagttgaaaaaattgccaaatattatgattttattgaaattcaaccaccggcactttatcaagatttaattgatagagagcttattagagatactgaaacattacatgaaatttatcaacgtttaattcatgcaggtgacacagcgggtattcctgttattgcgacaggaaatgcacactatttgtttgaacatgatggcatcgcacgtaaaattttaatagcatcacaacccggcaatccacttaatcgctcaactttaccggaagcacattttagaactacagatgaaatgttaaacgagtttcattttttaggtgaagaaaaagcgcatgaaattgttgtgaaaaatacaaacgaattagcagatcgaattgaacgtgttgttcctattaaagatgaattatacacaccgcgtatggaaggtgctaacgaagaaattagagaactaagttatgcaaatgcgcgtaaactgtatggtgaagatctgcctcaaatcgtaattgatcgattagaaaaagaattaaaaagtattatcggtaatggatttgcggtaatttacttaatttcgcaacgtttagttaaaaaatcattagatgatggatacttagttggttcccgtggttcagtaggttctagttttgtggcgacaatgactgagattactgaagtaaacccgttaccgccacactatatatgtccgaactgtaaaacgagtgaatttttcaatgatggttcagtaggatcaggattcgatttacctgataagacgtgtgaaacttgtggagcgccacttattaaagaaggacaagatattccgtttgaaacatttttaggatttaaaggagataaagttcctgatatcgacttaaactttagtggtgaatatcaaccaaatgcccataactacacaaaagtattatttggtgaggataaagtattccgtgcaggtacaattggtactgttgctgaaaagactgcttttggttatgttaaaggctatttgaatgatcaaggcatccacaaaagaggtgctgaaatagatcgactcgttaaaggatgtacaggtgttaaacgtacaactggacagcatccagggggtattattgtagtacctgattacatggatatttatgattttacgccgatacaatatcctgccgatgatcaaaattcagcatggatgacgacacattttgatttccattctattcatgataatgtattaaaacttgatatacttggacacgatgatccaacaatgattcgtatgcttcaagatttatcagggattgatccaaaaacaatacctgtagatgataaagaagttatgcagatttttagtacacctgaaagtttgggtgttactgaagatgaaattttatgtaaaacaggtacatttggggtaccagaattcggtacaggattcgtgcgtcaaatgttagaagatacaaagccaacaacattttcagaattagttcaaatctcaggattatctcatgggacagatgtgtggttaggtaatgctcaagaattaattaaaacaggtatatgtgatttatcaagtgtaattggttgtcgtgacgatatcatggtttatttaatgtatgctggtctagaaccatcaatggcttttaaaataatggagtcagtacgtaaaggtaaaggtttaactgaagaaatgattgaaacgatgaaagaaaatgaagtgccggattggtatttagattcatgtcttaaaattaagtacatgttccctaaagcccatgcagcagcatacgttttaatggcagtacgtatcgcatatttcaaagtacatcatccactttattactatgcatcttactttacaattcgtgcgtcagattttgatttaatcacgatgattaaagataaaacaagcatacgaaatactgtaaaagacatgtattctcgctatatggatctaggtaaaaaagaaaaagacgtattaactgtcttggaaattatgaatgaaatggcgcatcggggttatcgaatgcaaccgattagtttagaaaagagtcaagcgttcgaatttatcattgaaggcgaaacacttattccgccgttcatatcagtgcctgggcttggcgaaaacgttgcgaaacgaattgttgaagctcgtgacgatggaccatttttatcaaaagaagatttaaacaaaaaagctggattatctcagaaaattattgagtatttagatgagttaggctcattaccgaatttaccagataaagctcaactttcgatattcgatatgtaaaatgaaataatcaaggtatttatttaattcgtatggcgtagttaaagaaatacaaaattgttgctggacacaaagttatacctgtatttcttttcaacgtcttacgagtctattcgaatgtaatgatgaaataaatgaacaaacttttacaagaatctctgattaatagtgaagtcatttgtttcaagcataaacttatgctataattaagttgcttaaaaattagtgaactcaggcagaagagtgggagattcccgctcttttctatttgccaaaaagggaggcctgtatgagtaaaattacagaacaagtagaagtgattgttaaaccaattatggaagacttgaattttgaacttgtagacgttgaatatgtcaaagagggtagagatcattttcttagaatctctattgataaagaaggtggcgtagatttaaatgattgtacgctagcttctgaaaaaataagtgaagctatggatgcaaatgatcctattcctgaaatgtattatttagacgtagcgtcacctggtgcagaacgtccaattaaaaaagaacaagatttccaaaatgcaataactaaacctgtatttgtttctttatatgtaccaattgaaggtgaaaaggaatggttaggcattttacaagaagtcaataatgaaacaattgtagtacaagttaaaatcaaagcaagaacgaaagatatagagataccgagagacaaaatagcaaaagcacgtcacgcagttatgatttaacgtgatgaggaggaaaaaacgtgtcaagtaatgaattattattagctactgagtatttagaaaaagaaaagaagattcctagagcagtattaattgatgctattgaagcagctttaattactgcatacaaaaagaattatgatagtgcaagaaatgtccgtgtggaattaaatatggatcaaggtactttcaaagttatcgctcgtaaagatgttgttgaagaagtatttgacgacagagatgaagtggatttaagtacagcgcttgttaaaaaccctgcatatgaaattggtgatatatacgaagaagatgtaacacctaaagattttggtcgtgtaggtgctcaagcagcgaaacaagcagtaatgcaacgtcttcgtgatgctgaacgtgaaattttatttgaagaatttatagacaaagaagaagacatacttactggaattattgaccgtgttgaccatcgttatgtatatgtgaatttaggtcgtattgaagctgttttatctgaagcagaaagaagtcctaacgaaaaatatattcctaacgaacgtatcaaagtatatgttaacaaagtggaacaaacgacaaaaggtcctcaaatctatgtttctcgtagccatccaggtttattaaaacgtttatttgaacaagaagttccagaaatttacgatggtactgtaattgttaaatcagtagcacgtgaagctggcgatcgctctaaaattagtgtcttctctgaaaacaatgatatagatgctgttggtgcatgtgttggtgccaaaggcgcgcgtgttgaagctgttgttgaagagctaggtggcgaaaaaatcgatatcgttcaatggaatgaagatccaaaagtatttgtaaaaaatgctttaagcccttctcaagtgttagaagttattgttgatgaaacaaatcaatctacagtagttgttgttcctgattatcaattgtcattagcgattggtaaaagaggacaaaacgcacgtctagctgctaaattaaccggctggaaaattgatattaaatcagaaacagatgcgcatgaagcgggtatctatccagtagttgaagctgaaaaagtaactgaagaagatgttgctttagaagatgctgacacaacagaatcaaccgaagaggtaactgatgtttcagttgaaacaaatgtagagaaagaatctgaataataggttggagtgaagtatctatgaaaaagaaaaaaattccgatgcgaaaatgtattctttcaaatgaaatgcatcccaaaaaagatatgattcgtgttgttgttaataaagaaggcgaaatctttgcggatgttactggaaagaaacaaggccgtggcgcgtatgtttctaaagatgttgctatggttgaaaaagcacaacaaaaagaaattttagaaaaatattttaaagcatctaaagagcaattggatccggtttacaaagaaattattagattaatttatagagaagagatcccaaaatgagtatagatcaaatattaaactttttaggattagcaatgagagccggtaaagtaaaaacaggtgaatcagtcattgttaatgaaattaaaaaaaggaaatttgaagctcgttattgttgcaaatgatgcgtctaataatacagctaaattaattacagataaatgtaagagttacaaagttccattcagaaagtttggaaatcgaaatgaattgggaatagcacttggaaaaggtgagcgtgttaatgtagggattactgacccaggctttgctaaaaagttgctatcaatgatagatgaatatcataaggagtgattatatgagtaaacaaagaatttacgaatatgcgaaagaattaaatctaaagagtaaagagattatagatgagttaaaaagcatgaatattgaggtttcaaatcatatgcaagctttggaagatgaccaaattaaagcattagataaaaagttcaaaaaagaacaaaagaacgacaataaacaaagcactcaaaataatcaccaaaaatcaaacaatcaaaatcaaaataaagggcaacaaaaagataacaaaaagaatcaacaacaaaataataaaggcaacaaaggcaataaaaagaataatagaaataataagaaaaataacaagaataataaaccacaaagtcaaccagctgctccaaaagaaataccatcaaaagtgacatatcaagaaggtattacagtaggcgaatttgcggataaattaaatgttgaatcatcagaaattatcaaaaaattattcttacttggtattgttgctaatatcaatcaatcattaaatcaagaaacaatcgaattaattgccgatgattatggcgttgaggttgaagaagaagttgtgattaatgaagaagatttatcaatctacttcgaagacgaaaaagatgatccagaagcaattgagagaccagctgttgtaacaattatgggacatgttgaccatggtaaaactactttattagattcaattcgtcatacaaaagttacagcaggtgaagcaggcggaatcactcaacatattggtgcatatcaaattgaaaacgatggcaaaaaaatcactttcttagatacaccgggacatgctgcatttacaacgatgcgtgcgcgtggtgcacaagtaacagatattacaattttagtagtagcagctgacgatggtgttatgccacaaacaattgaagcaattaaccatgctaaagaagcagaagtaccaattattgttgcagtaaataaaattgataaaccaacttcaaatcctgatcgagttatgcaagaattaactgaatatggtttaattcctgaagattggggcggcgaaacaattttcgttccactttctgcattaagtggtgatggtatcgacgatttattagaaatgataggattagttgcagaagttcaagaacttaaagcaaatcctaaaaaccgtgctgttggtacagttatcgaagctgaattagataaatcacgaggtccttctgcatcattattagtacaaaacggtacattaaatgttggtgatgcgattgtagtgggtaatacttacggccgtatccgtgcaatggttaatgacttaggtcaaagaatcaaaacggctggtccatcaacgcctgttgaaattacaggtattaatgatgtgccacaagctggggatcgctttgttgtatttagtgatgaaaaacaagctcgtcgtattggtgaatcaagacacgaagctagcattgtacaacaacgtcaagaaagtaaaaatgtttcattagataacctgtttgaacaaatgaaacaaggtgaaatgaaagacttaaacgttattattaaaggtgatgttcaaggttctgttgaagctttagctgcatcattaatgaaaattgatgttgaaggcgtaaatgttcgtatcattcatacagcggttggtgcgattaacgagtcagacgtgacacttgctaatgcctcaaatggtattatcattggtttcaatgttcgtccagacagtggtgcaaaacgtgctgcagaagctgaaaatgttgatatgcgtttacacagagttatttataatgttatcgaagaaattgaatcagcgatgaaaggtttacttgatccagaatttgaagaacaagttatcggacaagctgaagttcgtcaaacattcaaagtttctaaagttggtactattgctggatgttatgttactgaaggtaaaattacgcgaaatgctggtgtacgtattattcgtgatggtattgttcaatatgaaggcgaattagatacacttaaacgtttcaaagatgatgctaaggaagttgcaaaaggttatgaatgtggtattacaattgaaaactacaatgaccttaaagaaggcgatgttatcgaagcatttgaaatggttgaaattaagcgttaattaaataaattacaagctaaaagtttagttaagattgatatgctccctataaatattacactttttaagtgtttactttatagggagcatatttgatacaagcttttggttttttattagaatagattacctattaaaagttacgttatatagacatgatttttgtataaaattttgtggtgacctagaatgctttttaatgacaaaatataatgtcgactattattggaaaattttctgttgaaatgcctatcttacggcaaactttatttgattttataggcttaatttattaaaataacgtgtgagctaaaataattgtttaagcattgttacactaaaaaatgcaaataacaattgaacttaaagataaagaggtgacaagaatgagcagtatgagagcagagcgtgttggtgaacaaatgaagaaggaattaatggatatcatcaacaataaagtcaaagatcctcgagttggttttattacaattacagatgttgttttaacaaatgatttatcgcaggctaaagtatttttaactgtattaggtaacgataaagaagtagaaaatacatttaaagcacttgataaagcaaaaggcttcattaagtctgaattaggttctagaatgcgattacgtattatgccggaattaatgtatgaatatgatcaatcaatcgaatatggtaataaaattgaacgaatgattcaagatttacacaaacaagatagataatttagtgttaggtatctggaaaatgtttgataatttcttaatatcggtatattaacattaaacagttaatacatagatgtgtagaaatagttaacattttccagtttttttatgaataaattcagttaatacgctattaaaatatatttttaaaaaagaaggtgacaacatgtataacggtatattaccagtatataaagaacgtggtttaacaagtcatgacgtcgtattcaaattgcgtaaaattttaaagactaaaaaaatagggcacactggtacgcttgatcctgaagttgcaggcgtgttaccggtatgtataggtaatgcaacgagagttagtgattatgttatggatatgggtaaagcttatgaggcaacggtatcgataggcagaagtacaacaactgaagatcaaacgggtgatacattggaaatgaagggtgtacattcagctaatttcaacaatgacgatattgaccgattgttagaaagttttaaaggtatcattgaacaaattccgccaatgtattcatcagtcaaggtgaatggtaaaaaattatatgaatatgcgcgtaataatgaaacagttgaaagaccaaagcgtaaagttaatattaaagatattgggcgtatatctgaattagattttaaagaaaatgagtgtcattttaaaatacgtgtcatctgtggcaaaggtacatatattagaacgttagcgactgatatcggtgtgaaattaggctttccggcacatatgtcgaaattaacgcgaatcgagtctggtggatttgtgttgaaagatagccttacattagaacaaataaaagaacttcatgagcaggattcattgcaaaataaattgtttcctttagaatatggattaaagggtttgccaagtattaaaattaaagattcgcacataaaaaaacgtattttaaatgggcagaaatttaataaaaatgaatttgataacaaaattaaagaccaaattgtatttattgatgatgattcagaaaaagtattagcaatttatatggtacaccctacaaaagaatcagaaattaaacctaaaaaagtctttaattaaaggagatagaatttatgaaagtcatagaagtgacacatcctatacaatctaaacagtatattacagaggatgttgcaatggcattcggatttttcgatggcatgcataaaggtcatgacaaagtctttgatatattaaacgaaatagctgaggcacgcagtttaaaaaaagcggtgatgacatttgacccgcatccgtctgtcgtgttgaatcctaaaagaaaacgaacaacctatttaacaccactttcagataaaatcgaaaaaattagccaacatgatattgattattgtatagtggttaatttttcatctaggtttgctaatgtgagcgttgaagattttgttgaaaattatataattaaaaataatgtaaaagaagtcattgctggttttgattttacttttggtaaatttggaaaaggtaatatgactgttcttcaagaatatgacgcgtttaatacgacaattgtgagtaaacaagaaattgaaaatgaaaaaatttctacaacttctattcgtcaagatttaatcaatggtgagttgcaaaaagcgaatgatgctttaggctatatatattctattaaaggcactgtagtgcaaggtgaaaaaaggggaagaactattggcttcccaacagctaacattcaacctagtgatgattatttgttacctcgtaaaggtgtttatgccgttagtattgaaatcggcactgaaaataaattatatcgaggggtagctaacataggtgtaaagccaacatttcatgatcctaacaaagcagaagttgtcatcgaagtgaatatctttgactttgaggataatatttatggtgaacgagtgaccgtgaattggcatcatttcttacgtcctgagattaaatttgatggtatcgacccattagttaaacaaatgaacgatgataaatcgcgtgctaaatatttattagcagttgattttggtgatgaagtagcttataatatttagagttgcgtatagttatataaacaatctataccacacctttttcttagtaggtcgaatctccaacgcctaactcggattaaggagtattcaaacattttaaggaggaaattgattatggcaatttcacaagaacgtaaaaacgaaatcattaaagaataccgtgtacacgaaactgatactggttcaccagaagtacaaatcgctgtacttactgcagaaatcaacgcagtaaacgaacacttacgtacacacaaaaaagaccaccattcacgtcgtggattattaaaaatggtaggtcgtcgtagacatttattaaactacttacgtagtaaagatattcaacgttaccgtgaattaattaaatcacttggtatccgtcgttaatcttaatataacgtctttgaggttggggcatatttatgttccaaccttaatttatattaaaaagttttttacaaatattaacatttattatatgttaagctaatattgagtgaataataaggttacaatgagataaagatgatataagtacacctagagtaataatcaagatattaaaaataaagtatgttttttaaaaaaatataacttatatttatactgataagggtgggacgataagtctattttgtaaataatagatggatatcccgctctctttttttccaattcaatattttataactaatattaaaatacgataataaatgatatgatataactattagattcaagagaggagatttataatgtctcaagaaaagaaagtttttaaaactgaatgggcaggaagatctttaacgattgaaacagggcaattagctaaacaagcaaatggcgctgtattggttcgttatggagatacagtcgtgttatcgacggcaactgcatcaaaagaacctcgtgatggagatttcttcccattaacagtgaactatgaagaaaaaatgtacgctgcgggtaaaattcctggtggatttaaaaagagagaaggacgtcctggtgacgatgcaacattaactgcgcgattaattgatagaccaattagacctttattccctaaaggatataagcatgatgttcaaattatgaacatggtattaagtgcagatcctgattgttcaccacaaatggctgcaatgattggttcatctatggcgcttagtgtgtcggatattccattccaagggccaatcgccggtgtaaatgtgggttatattgatggtaaatatatcattaacccaacagtagaagaaaaagaagtttctcgtttagaccttgaagtagctggtcataaagatgcagtaaacatggtagaagcaggcgctagtgagattactgaacaagaaatgttagaggcgattttctttggtcatgaagagattcaacgtttagttgatttccaacaacaaatcgtcgaccacattcaacctgttaaacaagaatttattccaacagagcgtgatgaagcgctagttgaacgtgtaaaatctttaaccgaagaaaaaggacttaaagaaacagttttaacatttgataaacaacaacgagatgaaaatcttgataacttaaaagaagaaatcgtcaatgaatttatcgatgaagaagatccagagaatgaattacttattaaagaagtttatgcaattttaaatgaattagtgaaagaagaagttcgacgtttaattgcagatgaaaaaattagaccagacggccgtaaacctgatgaaatccgtccattagattctgaagttggtattttacctagaacgcatggttcaggtctatttacacgtggtcaaactcaagcactttcagttttaacattaggtgctttaggtgattatcaattaattgatggtttaggacctgaagaagaaaaaagattcatgcatcattataacttcccgaatttttcagtaggtgaaactggtccagtacgtgcgccaggtcgtcgtgaaattggacatggtgcgttaggtgaaagagcattaaaatatattattcctgatactgctgatttcccatatacaattcgtattgtaagtgaggtacttgaatcaaacggttcatcatctcaagcgtcaatttgtggatcaacattagctttaatggatgcgggcgtaccgattaaagcaccagttgctggtattgctatgggccttgttacacgtgaagatagctatacgattttaacagatatccaaggtatggaagatgcattaggtgatatggactttaaagtcgctggtactaaagaaggtattacagcaatccaaatggatattaaaattgacggtttaacgcgtgaaattatcgaagaggctctagaacaagcgagacgtggtcgtttagaaataatgaatcatatgttacaaacaattgatcaaccacgtactgaattaagtgcttacgcgccaaaagttgtaactatgacaattaaaccagataagattagagatgttatcggacctggtggtaaaaaaattaacgaaattattgatgaaacaggcgttaaattagatatcgaacaagatggtactatctttattggtgccgttgatcaagctatgataaatcgtgctcgtgaaatcattgaggaaattacacgtgaagcggaagtaggtcaaacttatcaagccactgttaaacgtattgaaaaatacggtgcgtttgtaggcctattcccgggtaaagatgcgttgcttcacatttcacaaatttcaaaaaatagaattgaaaaagtggaagatgtattaaaaattggtgacacaattgaagttaaaattactgaaattgataaacaaggtcgagtaaatgcatcacacagagcattagaagaataatatttaaagtcatatgacgacaatgtatcgtcatgtgatttttttatgccattttttacgaagtgacccattttgaatttgttgtattgaacattttaaaacgctttattattttgtgtacaactgttaattatcctgtatgtatagtgattaatagtgtacatcaagtattttttaacttataatgaatagtgagtttatatatggacgggtaacaaatttaggaggtaagattttgagtttaataaagaaaaagaataaagatattcgcattataccattaggcggtgttggcgaaattgctaaaaatatgtatatcgttgaagtagacgatgaaatgtttatgttagatgctggacttatgtttccagaagacgaaatgctaggtattgatattgttataccagacatttcatacgtacttgaaaataaagaaaaattgaagggtatattccttacacacggacatgagcacgcgattggtgcagtgagttatgttttagaacaattagatgcaccagtatatggatctaaattgacaatagcgttaattaaagaaaatatgaaagcccgtaatattgataaaaaagttcgctactacacagttaataatgattcaattatgagattcaaaaacgtgaatattagtttctttaatacgacacacagtattcctgatagtttaggtgtttgtattcacacttcatatggtgccattgtgtatacaggtgaatttaagtttgaccaaagtttacatggacattatgcaccagatattaaacgtatggcagagattggtgaagaaggcgtatttgtcttaatcagtgattctactgaggcagagaaacctggatataatactccggaaaatgtgattgaacatcatatgtatgatgcttttgcaaaagtgcgaggtcgcttgattgtttcatgttatgcttcgaactttatacgtattcagcaagttttaaatattgctagcaagctaaatcgtaaagtgtcatttttaggaagatcacttgaaagttcatttaatattgctcgtaaaatggggtatttcgacattcctaaagatttgctaattcctataacagaagttgataattatcctaaaaatgaagtgataattatagctactggtatgcaaggagaacctgtagaagccttaagtcaaatggcgcaacataagcataaaattatgaatatcgaagaaggcgattctgtatttttagcaattacggcttctgctaatatggaagttatcattgcgaatacattaaatgagcttgtacgtgctggcgcacatattattccaaataacaagaagattcatgcttcaagtcatggttgcatggaagaattaaaaatgatgattaatattatgaaacctgaatactttattcctgtacaaggtgaatttaaaatgcagatagcacatgcgaagctagcagctgaagcaggtgttgcaccagaaaagattttccttgtggaaaaaggagatgtcattaattacaacggtaaagatatgatattaaatgaaaaggtaaattcaggaaatattttaatagatggtattggtattggggatgtaggaaatatcgtgttgagagaccgtcatcttttagcagaagatggtatctttattgctgtagtaacgttagatcctaaaaatagacgtatagctgcgggacctgaaattcaatctcgtgggtttgtatatgtacgtgaaagtgaagacttattacgtgaagcagaagagaaagtacgtgaaatagtagaagctggtttacaagaaaaacgcatagaatggtctgaaattaagcaaaatatgcgtgatcaaattagtaaactattattcgaaagtacaaaacgtcgtcctatgattattccagtaatttctgaaatttaatcaaaaagtcattaacataaaagaggtcagaacaagtcaccgaaatataatggttgtcatggacaatttacttatattttatgatggtcaattgaaaggggtaacgattaatctgttatcttaagtaaattgatacatagatgatattgttctaacctctttcatcgtctgtttggactacatattctaaacatcaaataggaaattatatagattaacgtcgttttaactaaagcaacataaggaggtgcgtcaattggcacaagcaaaaaagaaatcgacagctaagaaaaaaacaacatcaaaaaaaagaacaaattcgaggaaaaagaagaatgataatccgatacgttatgtcatagctattttagtagttgtattaatggtgttgggtgttttccaattaggaataataggtcgtctaattgacagcttctttaattatttatttgggtacagtagatatttaacatatattttagtactcttagcaactggttttattacatactctaaacgtattcctaaaactagacgaacggctggttcgattgtattgcaaattgcattgctatttgtatcacagttagtttttcattttaatagtggtatcaaagctgaaagagaacctgtactttcttatgtgtatcagtcataccaacacagtcattttccaaattttggtggcggtgtattaggcttttatttattagagttaagcgtacctttaatttcattatttggtgtatgtattattactattttattattatgctcaagtgttattttattaacaaaccatcaacatcgtgatgttgcaaaagttgcactggaaaatataaaagcttggtttggttcatttaatgaaaaaatgtcggaaagaaaccaagaaaaacaattgaagcgtgaagaaaaagcgagacttaaagaagaacaaaaggcacgtcaaaatgaacagccacaaataaaagatgtgagtgattttacggaagtgcctcaagaaagagatattccaatttatgggcatactgaaaatgaaagtaaaagccagagtcaaccaagtcgaaaaaaacgagtgtttgatgcagagaatagttcgaataacatcgtaaatcatcatcaagcagatcagcaagaacaattaatagaacaaactcataacagtgttgaaagtgaaaacactattgaagaagctggtgaagttacgaatgtgtcgtatgttgttccaccgttaactttacttaatcaacctgcaaaacaaaaagcaacatctaaagctgaagtgcaacgtaaaggacaagtactagagaatacattaaaagattttggggtaaatgcaaaagtgacacaaattaaaattggtcctgcagtaactcaatatgaaattcaaccagctcaaggggttaaagtgagtaaaattgtaaacttgcataatgatattgcattagctttagcagcaaaagatgttagaattgaagcgccaatacctggtcgctctgcagtaggtattgaagtgccaaatgagaaaatttcattagtttcactaaaagaagttttagatgaaaaattcccgtctaataataaactagaagttggattaggaagagatatatcaggtgatccaattactgttccactaaatgaaatgccacacttattggtggcaggatcgacgggtagtggtaaatctgtttgtataaatggtattattacaagtattttattaaatgctaagccgcatgaagttaaacttatgttaatcgatccgaaaatggttgaactaaatgtttataacggaattccacatttattaattccggttgttacaaatcctcataaagctgctcaagctttagaaaaaattgtagctgagatggaaagacgttatgatttattccaacattcatcaactagaaatattaaaggttataacgaattaatccgtaagcaaaatcaagaattagatgagaagcaaccagaattaccttatatcgttgttattgtagatgagcttgcagatttaatgatggtagctggtaaagaagttgaaaatgcgattcaacgtatcacacaaatggcacgtgcagcaggtatacatttgattgtagcgacacaaagaccttctgtggatgtaattacaggtatcattaaaaataacattccatctagaattgcttttgctgtgagttctcaaacagattcaagaactattattggtactggcggcgcagaaaagttacttggtaaaggtgacatgttatacgttggaaatggtgattcatcacaaacacgtattcaaggggcgtttttaagtgaccaagaggtgcaagatgttgtaaattatgtagtagaacaacaacaggcaaattatgtaaaagaaatggaaccagatgcaccagtggataaatcggaaatgaaaagtgaagatgctttatatgatgaagcgtatttgtttgttgttgaacaacaaaaggcaagtacatcattgttacaacgccaatttagaattggttataatagagcatctaggttgatggatgatttagaacgcaatcaggtaatcggtccacaaaaaggaagcaagcctagacaagttttaatagatcttaataatgacgaggtgtaaaaaaatgtcagaaatgaatgcggtatataacgttaaacaatacattttaaatttgattaagcaaaataaattggaatatggtgaccaacttccaagtaatttatcaattgccagagaattaaatgtaaaaaccgacgatgtttatgaagcaattcaggcattgattactgaacaagtcattaaagataattttgaagagggcacaagtgttaagtcactgccccctttcttttatccattgaatgaacttataagtattgggcaaatgattaaaaatgcaggatttgaatgcggaactgaatacttaaattttgatgagcaaccagcaactatgttagatgcaaatttgttgagtgttgaagaaggatatccagtaaccattatagaacgattacgaactgccgatggagaaccggtcgtctattgtttagataaaattgctaaaaaagaattaacatgtacagagtatcaaatgagcaatggatcgatactaagtgcgataaaagaacaaagtaatcataatatttgttacgctgatacagaaattgaagcggtaaattatgaacctcgaatatccgaagtactgaatgcttcgccacacgaaggtttgattttattaaaaattacgcactacaatgaatcagatgaacctattttgtattcattaaattatatgaaaaatagcttagttcaatttaaaatcactagaaaaatatagatgtaagaagatatagaggaggctatatatttgagtagacaatctcaaccaaatatacatatcaaagtttcaccaacaactaaatttaaaacaactactatagtttttaaatttatggcacctttagaatatgacacaataacagctagatcattattaagcaaattattagttcgagcaactaagaaatggccaaccgataagtcatttaataatcacttagccgatttatatggtgcgtatgtgaatagtacaatttcaaaattcaaagatcagcatgtcattacattttcattagaaattgttaatgaacgttatttaagaaatggtgaatcattatttaatcaaggattagatttattacaagaaatcatttggaatccattaattgaaaataaagcattcaatgataattttgttaaccaagagaaaacattattagccaaaaaaatagaagcaatggtagataacaaagcacaatattcgtttttaaaattactcgaccatatgtttgaaaatgaagcatataaatacttatctacaggacaactagaacaaatcccacatattactgctgaaacactatatcatacatatcaatcaatgattaataatgatcaatgttctgtttatgttgtcggcaatgtagaacctgaaagtgttgagaaacaaatacgtgaaaaatttgcacttaaaccattcgataaacatcaattccaacattctactcatcatttacacgatgaagaagttgattatattgttgaatatgatgacgtggatcaagctaaattaaatatgggataccgatttccaacacaatatggacaaagtggatatgctgcctttgttgtatttaacatgatgtttggaggagatccttcatctgttttatttaatgaagtgcgagaaaagcaaagtttagcgtactctatacattcacaaattgatggcaaaaatggctatttatttgttttgagtggggtttcaagcgataagtacgaaactgcaaaagacactattataagtgaatttgaaaaaataaaagcaggagatttcactgaagaaaaattagagttagctaaaaaagtaatcatttctcatcgatatgaatctgaagatcgtccgaaaagtattatagagattatgcataaccaaatattattagagcaaccacaaagcaaagaaacatttataaatgatatacagaaggtaagtcgcgaagatattgtttctgttgctgaaaaagcatttttagatacaatctatgtgttgacaaaaggaggggataaataatgaaagagcgttattatgaattaatagacgaaagagtattcgaacaagaattagaaaatggtttacgattatttattatccccaaaccaggttttcaaaagacatttgtcacttacactacacaatttggttcattagataatcaattcaaaccccttggacaagaccaatttgttactgtacctgatggagttgctcactttttagaacataaattatttgaaaaagaagaagaagacttatttactgcgtttgctgaagaaaatgcacaagcaaatgcgtttacaagctttgatcgtacaagctacttgttcagtgcaactgataatattgaaaacaacattaaacgtttacttacaatggttgaaacgccttattttacaaaagaaactgttgataaagaaaaaggtattattgcagaagaaataaaaatgtatcaagaacaacctggatataaattaatgtttaatacattgcgtgcaatgtatcaacaacatccaatacgtgttgatattgccggtagtgtagaaagtatatacgatattacaaaagatgatttgtatctatgttatgaaacgttttatcatccatcaaatatggttttatttgttgttggtgatgtggatcctgaagcaatatgtcgaatagtaaaacaacacgaggatgctcgtaataaagttaaccaacccaaaatcgaacgaggacttgttgatgaaccggaggatgttaaagaagcatttgttactgaatctatgaaaattcaatcaccaagactaatgcttggttttaaaaataaaccattacaagaagcgcctcaaaaatatgtacaacgtgatttagaaatgtcattattctttgagttaatttttggggaagaaacagatttttatcagaatttattaaacgaaggacttatcgatgatacatttggttatcaatttgtactagagccgacgtatagtttttcaatcgtgacaagcgctactgaagaaccagataaattaaaaaaattattattagatgagttgcgcgataaaaaaggcaatttccaagatgcagaagcatttgaacttttgaaaaagcaatttataggtgaattcatatcaagtttaaactcacctgaatatattgctaatcaatatactaaattgtattttgaaggtgttagtgtgtttgacatgttagacattgttgaaaacatcacgttagatagtattaatgaaacgtcatcgttatatttaaatttagatcagcaagtcgatagtcgtttggagattaaaaagtaatgaaagcattagtattaggtggttctggttcaattggttctgagatagtcaaacaattattaactgatggatttgaagtttatgtgcaatattatcgtactgatataaatgaattaactaacaaatttaatgatgataaagttcattttatacaagcggatttatctcaaacaattgatattgacaaaacatttggtgacattaaatcattagactgtttaatatatgcaagtggtcagtctttatatggtgttttacaagatatgaaagaccatgatattgatgcatgttatcagttaaatgtcttgcaattaattcgattatgtagatatttcgttgatgttttacgtcaaagtgacaatggaagaattattgtaatttcatcaatttggggtgagacaggagctagcatggaaactatttattcgacgatgaaaagtgcacaattaggtttcgttaaggcgcttagtcaagagcttgcactaacatcagtgacagtaaatgctatcgcacctggttttgtagctggtaatatggcaagtgagtggcaagaagatgaacttcaagcaatgataactgaattaccacaacagcgattggttttaccgagtgaggttgctcatacatgcgcctatttatatcacccaaatgctagaagtgttactggaactatacagaaagttaatggggcttggtatatttaaaatatagaactatttttatgagcaaatgtttttatgattgatgttataatatgaatattacaatgaatcataatttgttaattaaacaaggggtgaggttcaccatgacagttgcagagaaaaaagaatggtacctagaatacgaaattgaaattaatagaccgggtcttttaggtgatgtatctagtttattaggtatgttaggtataagtattgttacaattaatggtgttgatcaaggtaaacgaggccttttaattaaaacagacaatcttgaaaaagttgaacgttttgagcaaatagctcgtggtataaatgaaattgaaataacaaagcttaaaaaaccagaattaagagaccgtcttgcagttagacatggtagatatattgagcaagatgcaaaagataagaaaacctttcgatttgagcgtgaagatttaggcttgttagtagactttttagctgaattgttcaaagaagaaggtcataagttgattggcattagaggtatgccacgggttggtaaaaccgaatcaattgttgcgggaagtgtttgtgcacataagagatggttatttattagttctactttaataaaacaaactgtacgtagctctctaattaaaggggaatatgatgccaatcatgtatatattattgatggtgcagttactgccagagaatctaatccaaaacatcaagagcttgttaacgaagttatgacgttaccttcaatcaaagtcgttgaacacccagatttatttgttgaaacaagtacttgtacaatggaagattttgactatattatcgaattgagagaaaatgaaaatcaagaaatacattacgaagaaatgaagaaacagacagtccaaagtaagaataatttagattttggagatccatttggtggtggttttggtttcttcgagtaagtgtaaggaggctatgaattgaaaacggtcggtgaagcgctaaaaggtagacgtgaaaggttaggaatgactttaacagaattagagcaacgtactggaattaaacgtgaaatgctagtgcatattgaaaataatgaattcgatcaactaccgaataaaaattacagcgaaggatttattagaaaatatgcaagcgtagtaaatattgaacctaaccaattaattcaagctcatcaagatgaaattccatcgaaccaagccgaatgggacgaagtaattacagttttcaataataataaagacttagattataagagtaaatcaaaagagccaatacaattattagtaatcatgggtattacagttttaataactttattgttatggatcatgttagttttaatattttaacagaaataaattagtgagaaatgaggatgtataatgaatattccgaaccagattacggtttttagagtagtgttaataccagtttttatattgtttgcgttagttgattttggatttggcaatgtgtcatttctaggaggatatgaaataagaattgagttattaatcagtggttttatttttatattggcttcccttagcgattttgttgatggttatttagctagaaaatggaatttagttacaaatatggggaaatttttggatccattagcggataaattattagttgcaagtgctttaattgttcttgtgcaactaggactaaccaattctgtagtagcaatcattattattgccagagaatttgccgtaactggtttacgtttactacaaattgaacaaggatttgtaagtgcagctggtcaattaggtaaaattaaaacagcagttactatggtagcaattacttggttgttattaggtgatccattggcaacattgattggtttgtcattaggacaaattttattatacattggcgttatttttactatcttatctggtattgaatacttttataaaggtagagatgtttttaaacaaaaataaatatttgtttatactagatttcattttcatatggaatctagttttttaatcccaattttagaaattagccacgcatttgtttataatgatatattgtaaaataatatttgttcattttttagggaaatgtgttgtagcatctgatacattgaatttaaaattgatgtgaatttttaaatggaatacatgaaaaaatgaattaaacgatacaagggggatataaatgtcaattgccattattgctgtaggctcagaactattgctaggtcaaatcgctaataccaatggacaatttctatctaaagtatttaatgaaattggacaaaatgtattagaacataaagttattggagataataaaaaacgtttagaatcaagtgttcgtcatgcgttagaaaaatatgatactgttattttaacaggtggcttaggtcctacgaaagatgacttaacgaagcatacagtggcccagattgttggtaaagatttagttattgatgagccttctttaaaatatattgaaagctattttgaggaacaaggacaagaaatgacacctaataataaacaacaggctttagtaattgaaggttcaactgtattagcaaatcatcatggcatggctccaggaatgatggtgaattttgaaaacaaacaaattattttattaccaggtccaccgaaagaaatgcaaccaatggtaaaaaatgaattgttgtcacattttataaaccataatcgaattatacactctgaactattaagatttgctggaataggtgaatctaaagtagaaacagtattaatagatcttatcgataaacagactaatcctacgattgcgcctttggcaggaagtcatgaagtatatattagattgactgcaaatgccgactcaaaagaacaagcacaatcattgattcaacctgttaagcaagaaattcttgatcgtattggagaatattattatggttcagatgacacattaattgagcaagctgtaataaagaaaattaatgaaccttttgtaatatatgatggtattactaatggtgctttatatcatcgattgaaagaagtggatttaaacgatgttctaaagggtatgattaatcacaatgaaaactttgttgatattaataaacctattgagcagcaattaaaagatgcagtgcaatttgttaataaattatttaatgtgtcatcagcaattattctattagagtatgatggtgtagtccatataggctatgataataacttagaatttaaaactgagcaatttaaaatgtctaaatctagaaatttattaaagaacagaagtcaaaattatgcgcttataaggttattaaattggcttagaacaacaaattaattgtattatcgataaaaatataagcacgtttgttcgtttttgtgttttgatttcaagattttacacgaacaaatattcgcaaaacacttgtattttattttgaatccttgtatagtattggtaagataattaaaagatagcaatttcaattaggaggtctcgctttggataacgatcgtcaaaaagctttagatacagtaattaaaaatatggagaaatctttcggtaaaggtgccgtaatgaagttgggtgacaatataggtcgccgagtttcaactacatcaactggttcagttacattagataatgcgctaggtgtaggtggctatcctaaaggacgaattattgaaatttatggtcctgaaagttctggtaagacaacagtagcgcttcacgctattgctgaagtacaaagtaatggcggggtggcagcatttatcgatgctgaacatgctttagatccagaatatgctcaagcattaggcgtagatatcgataatttatatttatcgcaaccggatcatggtgaacaaggtcttgaaatcgctgaagcatttgttagaagtggtgcagttgatattgtagttgtagactcagttgctgctttaacacctaaagctgaaattgaaggagaaatgggagacactcacgttggtttacaagctcgtttaatgtcacaagcgttacgtaaactttcaggtgctatttctaaatcaaatacaactgctattttcatcaaccaaattcgtgaaaaagttggtgttatgttcggtaatccagagactacaccaggtggacgtgcattaaaattctatagttcagtaagactagaagtacgtcgtgcagaacagcttaaacaaggacaagaaattgtaggtaatagaactaaaattaaagtcgttaaaaataaagtggcaccaccatttagagtagctgaagttgatattatgtatggacaaggtatttctaaagagggtgaacttattgatttaggtgttgaaaacgacatcgttgataaatcaggagcatggtattcatacaatggcgaacgaatgggtcaaggtaaggaaaatgttaaaatgtacttgaaagaaaatccacaaattaaagaagaaattgatcgtaaattgagagaaaaattaggtatatctgacggtgatgttgaagaaacggaagatgcaccaaagtcattatttgacgaagaatagtacacaaatttatatctatagttaaacttagcaaatatccttataggattgattgaaagtgatattcatctcataaagctggaataatatctaactttatgggatgcacttcaaatcgagactataaggttttttattttatttatttttacattatcaatagttttataatcgagcttcaaaactttagaaaatagtagaaatagcattcaatatagtgcaaaagtgcaaattgataacttgacacttatctcctataaaccgtacaattaatttgtatgatttatatataatttcataaagtcatattgaatttcatataaagagcaaaccctagaaaaggaggtgtttgtgtgaatttattaagcctcctactcattttgctggggatcattctaggagttgttggagggtatgttgttgcccgaaatttgttgcttcaaaagcaatcacaagctagacaaactgccgaagatattgtaaatcaagcacataaagaagctgacaatatcaaaaaagagaaattacttgaggcaaaagaagaaaaccaaatcctaagagaacaaactgaagcagaactacgagaaagacgtagcgaacttcaaagacaagaaacccgacttcttcaaaaagaagaaaacttagagcgtaaatctgatctattagataaaaaagatgagattttagagcaaaaagaatcaaaaattgaagaaaaacaacaacaagtagatgcaaaagagagtagtgttcaaacgttaataatgaagcatgaacaagaattagaacgcatctccggtctcactcaagaagaagctattaatgagcaacttcaaagagtagaggaagaactgtcacaagatattgcagtacttgttaaagaaaaagaaaaagaagctaaagaaaaagttgataaaacagcaaaagaattattagctacagcagtacaaagattagcagcagatcacacaagtgaatcaacggtatcagtagttaacttacctaatgatgagatgaaaggtcgaatcattggacgtgaaggacgaaacatccgtacacttgaaactttaactggcattgatttaattattgatgacacaccagaagcagttatattatctggttttgatccaataagaagagaaattgctagaacagcacttgttaacttagtatctgatggacgtattcatccaggtagaattgaagatatggtcgaaaaagctagaaaagaaatagacgatattataagagaagcaggtgaacaagctacatttgaagtgaacgcacataatatgcatcctgacttagtaaaaattgtagggcgtttaaactatcgtacaagttacggtcaaaatgtacttaaacattcaattgaagttgcgcatcttgctagtatgttagctgctgagctaggcgaagatgagacattagcgaaacgagctggacttttacatgatgttggtaaagcaattgatcatgaagtagaaggtagtcatgttgaaatcggtgtagaattagcgaaaaaatatggtgaaaatgaaacagttattaatgcaatccattctcaccatggtgatgttgaacctacatctattatatctatccttgttgctgctgcagatgcattgtctgcggctcgtccaggtgcaagaaaagaaacattagagaattatattcgtcgattagaacgtttagaaacgttatcagaaagttatgatggtgtagaaaaagcatttgcgattcaggcaggtagagaaatccgagtgattgtatctcctgaagaaattgatgatttaaaatcttatcgattggctagagatattaaaaatcagattgaagatgaattacaatatcctggtcatatcaaggtgacagttgttcgagagactagagcagtagaatatgcgaaataatttttgtctccctcacaaattagtgagggagcttttttaagttgtagtttcaatctagttagacagtactttattggtaataactatattagacagtagttatttgaaagtaagatggaccttatattaaataagaagttattgcttttaataaaaatgttttaggttcataattactatatttatattatgtaaacctataaaggtgattgctttttcaaactaaaaaaaagaagagaagatgtaacacatcttctcttctgtaatattaattagaaattatttctaagttgagttattttaattgtaaatctgttttctttaattcttttataacttctgcagtatcataacaatttgttgcaattgttgaatatctctctgctaaacgatatgcattaatgtaaagctttaaactttctttagctatatcctctgcatcttcgaattttgatgggttagacataaccactaattctgcaaatttttctggatcaatattaatagacatgtatttatttacaactcctatttattttgatgtcttaatactaacatattgaagttttcagacaaagtaatgtctctctataattgaagaaaaataattcaaagaatttaatatttactttaaatattagaacgtatgaattaaactagtatttatgagaggatgaacaaaacatgagaataatgtttataggggatatcgtaggtaaaattggacgagacgcaattgaaacgtacatacctcaactgaagcaaaagtataaaccaacagttacaattgtaaatgctgaaaatgcagcgcatggtaaaggcttgactgaaaaaatatataaacaattactaagaaatggtgtagatttcatgactatgggtaatcacacatatggtcaacgtgaaatttatgattttatagatgaagcaaaacgactagtaagaccagctaattttccggatgaagcgccgggaattggtatgagatttataaaaattaatgatattaaacttgcagttattaatctgcaaggaagagcgtttatgccagatattgatgatccttttaaaaaggcagatcaattagtcaaggaagcacaagaacaaactccgtttatatttgttgattttcatgcagaaacaacttctgaaaagtatgcaatgggatggcatttagatggtagagctagcgctgttgttggaacgcatacacacattcaaacagcagatgaacgtattttaccaaagggtacagggtatataacggatgttggtatgacaggcttttatgacggcattttaggaataaataaaacagaggtaattgagcgttttatcactagtttgccacaaagacatgttgttccaaatgaaggtagaagtgtattatctggtgttgttattgatttggacaaagaaggtaaaacaaagcacatcgaacgtatattgataaatgatgaccatccattttcaacattttaaaattacgtaagtaaacattctaattggaccctatcgtccattagtatgaatttaatatagtaccactgtttacatagtaaatcggtggttctttttgttatcatttaatatgaaatatatccataggaggcatataactatgaaaccacaattatcgtggaaagttggcggtcaacaaggcgaaggtattgaatcaactggggaaatcttcgcaacggctatgaatagaaaaggatattatttatatggatatagacatttttcaagtcgtatcaaaggtggacatacgaataataaaattagagtttctacgacgcctgttcatgcaattagtgatgatttagatattttgattgcatttgaccaagaaacaattgatgttaaccatcatgaaatgagagaagacagtatcattttagctgatgccaaggctaaacctgtgaaaccagaaggatgtcatgcacagcttattgaattaccttttacagcaaccgctaaagaattaggtacagcattaatgaaaaacatggttgcaataggtgctactagcgcattgatgaatttgaatacaaatacatttgaagaacttattactaatatgttttctaaaaaaggtgacaaggtagttgaagtcaatatccaagcattaaacgaaggttatcaattaatgcaatctcgcttatctgaaatcgacggggactttgaattagagtcaacagatgcactaccacatctatatatgattggtaacgatgccattggattaggtgcaattgctgcaggttcacaatttatggcggcatatcctattacacctgcgtctgaagttatggaatatatgattgccaatatatctaaagtaaacggagcggttattcaaacagaagatgaaattgctgctgtaactatggctattggtgcaaattatggtggagtcagagcgtttacggctagtgctggtccaggtttatctttaatgatggaagcaattggattatctggtatgactgaaacgccattagtcataattaatacccaacgaggtggaccttctactggattacctacgaaacaagaacagtcagatttaatgcaaatgatttatggtacacatggtgatattccaaaaatagttgtagcacctactgatgcagaagatgcattttatttaactatggaagcctttaatttagcagaacaatatcaatgccctgttatagttctaagtgatttacaattatctttaggaaaacaaactgttgaaaaattagattataatcgcattgaaattaaacgtggtgaaatcattcaatctgatattgaacgtgaagaagatgataaaggttatttcaagcgttatgcgttaacatccaatggtgtttctcctagacctatcccgggtgttaaaggaggtattcatcatataactggtgtggaacacaatgaagaaggtaaacctagcgaatctgcgtcaaatagacaacaacaaatggaaaaacgaatgcgtaaaattgagcagttactaattgaatcgccagtagaagctaacttacaacatgaagatgcagatattctttatatcggttttatttctacaaaaggtgcaattcaagaaggtagtaatcgtttgaatcaacaaggcataaaagttaacactatacaaattagacaattgcatccattcccaacaagcgttattcaagatgcagttaataaagcgaagaaagtcgttgtagtggagcacaattatcaaggacaattggctagtattataaaaatgaatgtcaatattcatgataagattgaaaattatacaaagtatgatgggacacctttcctaccacatgaaatcgaagaaaaaggtaaaataattgctactgaaataaaggagatggtatagatgccgacatttaaagattttagaaataatgttaagcctaactggtgccctggatgtggcgatttctcagtacaagctgcaattcaaaaagcagccgcaaatatagggttagaacctgaacaagtagctatcatcaccggtataggatgttctggccgtctttcaggatatattaattcttatggcgttcattctattcacggacgtgcattacctttagctcaaggtgtaaaaatggcgaataaagatttaactgttattgcatctggaggagatggtgatggttatgctattggtatggggcatacaatccatgctttaagaagaaatatgaacatgacgtatatagtcatggataatcaaatttatggtttgacaaagggacaaacatcgccgtcatcagcagtaggatttgttactaaaacaacgccaaaaggtaatatagaaaaaaatgttgcgcctttagaattagcattatcatctggtgccacatttgtagcccaaggtttttcaagtgatattaaaggattaacaaaactaattgaagatgcaattaatcacgatgggttttcatttgttaatgtcttttcaccatgtgtgacttataataaaattaacacatacgattggtttaaagaacatttaacaagtgttgatgacattgaaaactatgattctacagataaacaattagcgactaaaactgttattgaacatgaatctttagtaactggtattgtttatcaagataaagaaaccccatcatatgaatctcaaatcaaagagttagatgatacaccactagctaaaagagatatcaaaattactgaagacacgttcaatgcattaactgaacaatttatttaataattaaaactgagtcgtataaatgtatttataacagatccatttatgctactcagtttttttactattacaaaatataaaggagtttttaaaaatgaaagacacattaatgagtatacaaataattcctaaaacaccagacaatgacaatgttataccttacgtagacgaggcgattaaaataattgacgaatctggtttgcattttagagtaggtccgttagaaacgacagtacaaggaaatatgaatgaatgtttaattttaatacaatcgttaaatgaacgaatggtggaacttgaatgtccaagtattattagccaagttaagttttatcatgtgccagacggcattactattgaaactttaactgaaaaatatgatgaataacattaaaagtgaagtaaactggatttgaattggcttgttagagatgacgtataactttaactgtttttgcactttatagttaaatttaatataattattaaatgatacgggcaaatagaaaggattttgtaaagtgaacgaagaacaaagaaaagcaagttctgtagatgttttagctgagagagataagaaagcagaaaaagattatagtaaatattttgaacatgtttatcaaccgcctaatttaaaagaagcgaaaaaaagaggtaaacaagaagttcgttataatagagatttccaaattgatgaaaaatatcgcggtatggggaacgagcgtacatttttaattaaaacatatggatgtcaaatgaatgcacatgacactgaggtcattgctggtatacttgaagcattaggctatcaagcaacgactgatattaacactgcagatgttattttaattaatacatgtgcgattagagaaaatgccgagaacaaagtttttagtgaaataggtaatttgaagcatttgaagaaagaacgacctgatattttaatcggagtttgtggttgtatgtcacaagaagagtcagtagtgaataaaattttaaaatcgtatcaaaatgtagatatgatatttggtacacacaatattcatcatttaccagaaattttagaagaagcatacttatctaaagcaatggttgttgaagtatggtctaaagaaggagacgttattgaaaatcttccaaaagtccgtgaaggcaacattaaagcatgggtcaatattatgtatggttgtgataagttttgtacatattgtattgttccatttacaagaggcaaagaacgaagccgtagacctgaagacattatagatgaagtacgtgaacttgctcgtgaaggttacaaagaaataacgcttttaggtcaaaatgtaaattcttatggtaaagatttacaggatatagaatatgacttaggagaccttttacaagcaatttctaaaatagcgattccaagagttcgtttcacaacaagtcatccttgggacttcacagatcacatgattgatgttatttcagaggggggtaatatcgttcctcatatccacttgccagttcaatctggaaataatgcagtattaaaaataatgggtagaaaatatacacgagaaagttatttggatttagtaaaacgaatcaaagatagaattccaaatgtagcattaactacagatattattgtagggtatccaaatgaatcagaggaacaatttgaagaaactttaactttgtatgatgaagttggttttgaacatgcatatacgtatttgtattcacaacgtgatggtacgcctgctgctaaaatgaaagataatgtacctttagatgtcaaaaaggaacgattgcaacgtttgaataaaaaagttggtcattattcacaaatagctatgagtaagtacgaaggacaaactgtaacagtactttgtgaaggtagtagtaaaaaagatgatcaggttcttgctggctacactgataaaaataagttagttaatttcaaagcgcctaaagaaatgattggtaaactagtggaagtacgaatagatgaagctaaacagtattcattaaatggcagctttgtaaaggaagtagagccggaaatggtgattcaataaatgtataataaagatgacgtgttgaaacaagcggataatattgcaaataaaattaaaaatttggatactatcaaaacatatcaacaaattgaagcacagattcatcagaaccaaacgataaagactaaaatggatatgttaaaaaagcatcaaaaacaagcagtaaactttcaaaattacgggaaacaaaatgcgctagaacagtcggaacataccattcaaagtatagaagcagaaataaatacattgcccatagttgaacagtttcaaacttcacaatatgaagcgaatcaattattgaaaatgtttgtatcaacaatggaaacacgtttaaatgaccataataaagccaaacatagtgattaattacaaacaaaaaggagaacaatcatatgaaatcaagaaaactggctataactgcacttttaattgcaataaatgttgtattaagcagtattatcatcattcctctaggaccagttaaggcagcaccagtacagcattttgtaaatgtattaagtgcggtcatagtaggtccttggtatggattagctcaagcgcttatatcatcaattttaagagttctttttggaactggtacagcttttgcatttccgggtagtatgattggagttttattggctagtatgttttacatatatcgtaaacatatattcatggccgcggtcggtgaagtacttggaactggtgtcatcggaagtttaatttgtataccattagcatatttccttgggcttcaagacttcttcattaaaccgttaatgattacgttcatagtctcaagtgctatcggatctattataagttatttcttattacttactctaaaaaaacgtggtattcttcaaaggtttataaaataattttatgatatatgatttcaaacagagtcattgttcattttaatattgaacgcccttacttaattaaatgtcttgaatgttagaattttaatataattctaaacatgctattaacacattttattaggtttgaggcgttttcttatacatttaagatgcttcgttattatatggtatgaataggtttgtaaaagtaagtatgttaaaatgtataagttaaataattaataattagaaagcttacaaacgaatatattgtaaagacaaattttaaaaagagacaagggttgtgaagaaataatatgtctaatgttacaccaatgatgcagcaatatttaaaaataaaatcagaataccaagattgcttattattttttagactaggtgatttctatgaaatgttttatgaagatgccaaggaggcatcacgtgtacttgaaattactttaactaaaagagatgctaaaaaagaaaatccaattccgatgtgtggtgttccgtatcattctgcagatagttatatagatacacttgttaataatggatataaagtagctatttgtgaacagatggaagatccgaaacaaacgaaaggtatggttagacgtgaggtagtaagaattgtgactccaggaactgtgatggagcaaggtggtgtagatgataaacaaaataactatattttaagttttgttatgaatcaacctgaaattgcgcttagttactgtgatgtttctactggtgaattaaaggttacacattttaatgatgaagcgactttattaaatgaaattacgacgataaaccctaacgaagttgttatcaatgacaatatttccgatcatttaaaaagacaaattaatatggtgacagaaacaataacagtcagggaaacgttatcatctgaaatctacagtgtgaatcaaactgaacataaattaatgtatcaagcgacacaattattgctagattatattcatcatacacaaaaacgtgatttatcgcatattgaggatgctgttcaatatgcagctatagattatatgaaaatggatttttatgctaagagaaaccttgagttaacggaaagcattcgattaaaatccaaaaaaggaacgctactttggctgatggacgaaacgaaaacaccaatgggagcacgccgattaaaacaatggatagatagaccactaataagtaaagaacaaattgaagcacgattagatatcgttgatgaatttagtgctcatttcatagaaagagacaccttaagaacatatcttaatcaagtgtatgatattgaacgtcttgttgggcgtgttagttacggaaatgttaatgcgagagatttaattcaacttaaacattccatttctgaaataccgaatattaaagcattactaaattctatgaatcaggatactcttgtacaagttaatcaactagaaccacttgatgatttacttgatatattagaacagagtttagtagaagaaccaccaatttcagttaaagatggtggactattcaaagttggttttaatatgcaattagatgaatatcttgaagcttcaaaaaacggaaaaacatggttagcagaactacaagcaaaagaaagacaacgtacaggaataaaatcattgaaaataagctttaataaagtgtttggttattttatagaaataacacgtgccaacttgcaaaattttgaaccaagtgaatttggttatatgaggaagcaaacgttatcgaatgcggaacgatttataactgatgaacttaaagaaaaagaagatatcattttaggtgcggaagacaaagccattgaattagaatatcaattatttgttcagctacgtgaagaagttaaaaaatatactgaacgtttacaacatcaagctaaaattatttcagagttagattgtttacagagctttgcagaaattgctcaaaaatataattatactaggccttcatttagtgaaaataaaacattagaattagtggaatctaggcacccagtagtggaaagagtaatggattataatgactatgtgcctaataattgtcgattagataacgaaacatttatatatttaattacaggtccgaatatgtctggtaaatcgacgtatatgagacaagttgccataattagtataatggcccaaatgggagcttatgtcccttgtaaagaggctgtgttacctatatttgatcaaatattcactagaataggtgcggcagatgatttggtttcaggtaagagtacgtttatggtagaaatgctagaagcacaaaaggcattaacttatgcaacagaggatagtttgattattttcgatgaaattggacgtggtacttcaacgtatgacggtttagctttagcgcaggcaatgatagagtatgtagctgaaacatcacatgctaaaacgttattttcaacacattatcatgaattgacaacattagatcaagcattaccaagtctaaaaaatgttcacgtcgctgctaatgaatataaaggtgaacttatattcttgcataaagtcaaagatggtgcagttgacgatagttatggtattcaagttgcgaaattagctgatttacctgaaaaagttattagcagagcacaagtgatcctaagcgagtttgaagcgtctgctggtaaaaaatcatcgatatcaaatttaaaaatggtcgaaaatgaacctgaaattaatcaagaaaattcaaacttaagtgttgaagaaacaactgatactttatctcaaaaagactttgaacaagcatcatttgatttgtttgaaaatgatcaagaaagcgagattgaactacaaattaaaaatttgaatttatctaatatgacaccaattgaggcattggtgaagttaagtgaattacaaaatcaattaaaatagaggtgttgcaaaatggggaaaattaaagaactccaaacctcattagcaaataaaatcgcagcaggtgaagtagttgaaagaccgagttctgttgtgaaagaactgttggaaaatgctatagatgcaggcgctacagaaataagcattgaagtagaggaatctggcgtccaatctattcgcgtagtcgataatggaagcggaattgaagcggaagacttaggattagtatttcatagacatgcgactagtaagttagatcaagatgaagatttatttcatattaggacgttaggattccgtggtgaagcactagccagtatttcatcagttgctaaagtaacattgaagacttgcacggataatgctaatggaaatgaaatatatgtagaaaatggtgaaatattaaatcataagcctgcaaaagcgaaaaaaggaacagatatacttgtagaatcattattttataatacaccagcacgtttaaaatatataaaaagtttatacactgaactaggtaaaataacagatattgtcaacagaatggcaatgagtcatccggacattcgaatagcactcatttcagatggcaaaacaatgttaagtacaaatggttcaggaagaactaatgaagtgatggcagagatttatgggatgaaagttgcacgagatttagtacatatatctggagatacaagtgattatcacattgaaggttttgttgcaaagcctgaacattctagaagtaataagcactatatttctatttttattaatggacgatacattaaaaactttatgttaaataaagcgattttagaaggctatcatacactcttaacaataggtaggttcccgatttgttatattaatattgaaatggatccaatcttagtagacgtaaatgttcatccaacaaaactagaagtgcgtttatcaaaagaagagcaactatatcaattgatagtgagcaaaatacaagaagcatttaaagaccgtatattaattcctaaaaataacttggattatgtgccgaaaaaaaataaagtgttacattcattcgaacaacaaaaaatcgaatttgaacaaagacaaaacacagagaataaacaagagaagacgttttcatctgaagaaagtaacagtaagccatttatggcagaaaatcaaaacgatgagatagttataaaagaagattcatataatccattcgtaacgaaaacatctgaaagtttaatagctgatgatgaatcttctggttataataatacacgtgaaaaagatgaagactacttcaaaaaacaacaagaaattttacaagaaatggatcaaacatttgattcaaatgacgatacatctgtgcaaaattatgagaataaagcgtctgatgattattatgatgtaaacgatattaaaggaacaaaaagtaaagaccctaaacgaagaattccatatatggaaattgttggccaagtacatggaacgtatattattgctcaaaatgaatttggcatgtacatgattgaccagcatgcagctcaagaaagaataaaatatgaatattttcgagataaaataggtgaagttaccaatgaaatacaagatttattaatcccgttaacatttcatttttcaaaagatgaacaattagtcattgatcaatataaaaatgagcttcaacaagtaggtatcatgttagaacattttggtggtcatgattatattgtaagtagctatccagtttggttccctaaagatgaagtagaagaaattattaaagatatgattgagctaattttggaagagaaaaaagtagatatcaaaaaattacgtgaagatgtagcaatcatgatgtcatgtaaaaaatctattaaagcgaatcattatttacaaaaacatgaaatgtctgatttaattgatcaattaagagaagcggaagatccatttacatgtccacatggtcgtccaattatcattaatttttcaaaatacgaattagaaaaattatttaagcgtgtgatgtagagaggatgaatcaagtgaataacaacatattgcctgccataagaaacattaaagatttagagaaactgattaaaacagattataaaatgtgtgtgcttctagatatgcatataggacatataaaaagtattatggaattgctgaagcaaaatcatatagagtgttttattcatatagatttgataaaaggtttaagtcacgatgaatttgcaagtgaatttattattcagcaatacaagccaaaaggtattgtatcgactaaatctaaagtaataaaaaaagcgaaatcattaaatactttaacgatttttagagtgtttattattgatagtcaagcattgaaacgcagtatagatttgataaaaaaagttgaacctgattttgttgaagtacttccgggtgttgcgagtaaagcgattcatcatattcagaaagaaacaaacacacaagtcattgcaggtggcctaattaatacaatagatgaagttaatgaagctgttaaaaatggagcgaaatatgtaacaactagttatgataaactctggtgaatcataagtctgcaaaaattagatttttcactagatttagtcatataacatattaaaaaagccgttttcatatgggatatgtaataaggaatttaaggtatcatacaaagaataattaaataaaataattagcacctctaaaacgattaaaatcattaaagttatagaggtgtttatttgtaaaaaatgcaactagtcataaaaaatatggctgaagaatgtcatttaaacaaaatggcgtcataaataatttagttaggattgatatttctagttttcaaattaaatcacttttataaagacttgaaaaattaaatttgacaaaatttttacaaaaaccattgacaacgctttcatctcaatagtattataacaaatataataaaagttaatacatagaatagagacgggagatttctacgagccaaactgctagtgtaggaatctctttgtctttttgggaggacatttaatatgaatgtatatttagcagaattcctaggaactgcaatcttaatcctttttggtggtggcgtttgtgccaatgtcaatttaaagagaagtgctgcgaatggtgctgattggattgtcatcacagctggatggggattagcggttacaatgggtgtgtatgctgttggtcaattctcaggtgcacatttaaacccagcggtgtctttagctcttgcattagacggaagttttgattggtcattagttcctggttatattgttgctcaaatgttaggtgcaattgtcggagcaacaattgtatggttaatgtacttgccacattggaaagcgacagaagaagctggcgcgaaattaggtgttttctctacagcaccggctattaagaattactttgccaactttttaagtgaaattatcggaacaatggcattaactttaggtattttatttatcggtgtaaacaaaattgctgatggtttaaatcctttaattgtcggagcattaattgttgcaatcggattaagtttaggcggtgctactggttatgcaatcaacccagcacgtgatttaggtccgagaattgcacatgcgattttaccaatagctggcaaaggtggttcaaattggtcatatgcaatcgttcctatcttaggaccaattgccggtggtttattaggtgcggtagtatacgctgtattttataaacatacatttaatattggttgtgcaattgcaattgttgtagttattattactttgattttaggttacattttaaataaatcatcaaaaaaaaggtgatatcgaatcaatttactaaaataaaaagaaatgtaaatagcataatttaacatgtttgattcatggattatgctattttttcgccaaaatttaacggattttgtacaatgggttagcgattatttttttaataaaggagatactactaatggaaaaatatattttatctatagaccaaggaacaacaagctcaagagcgattttattcaatcaaaaaggggaaattgcaggggtagcacaacgtgagtttaagcaatattttccacaatcaggttgggttgaacatgatgcaaatgaaatttggacatctgtgttagctgtaatgacggaagtaattaatgaaaatgatgttagagctgatcaaattgcaggtatcggtattacaaaccaacgtgaaacaacggttgtttgggacaaacatactggccgcccaatttatcacgcaattgtttggcaatcacgtcaaacacaatcaatttgttcagaattaaaacaacaaggatatgaacaaacatttagagataagacaggattacttttagatccgtattttgcaggtacaaaagttaaatggattctagacaatgttgaaggtgcacgagaaaaagcagaaaatggcgatctattatttggaacgattgatacttggttagtatggaaattatcaggaaaagccgcgcatattactgattattcaaatgcgagtcgtacattaatgtttaatatccatgatttagaatgggacgatgagttattagaactacttacagtacctaaaaatatgttgccagaagttaaaccttcaagtgaagtatatggtaagacaattgattaccacttctatggtcaagaagtaccaattgctggtgtagctggtgatcaacaagcagcattatttggacaagcttgcttcgaacgtggtgacgtgaaaaacacatatggaactggtggcttcatgttaatgaatacaggtgacaaagcggttaaatctgaaagtggtttattaacaacaattgcttatggtattgatggaaaagtaaattatgcgcttgaaggttccatctttgtttcgggttcagcaatccaatggttacgtgatggattaagaatgattaattcagcaccacaatcagaaagttatgcgacacgagttgactctactgagggtgtttatgttgttccagcttttgtaggtttaggaacaccatattgggattctgaagcacgtggtgcgattttcggtttaacacgtggaactgaaaaagagcactttatccgtgcaacattagaatcattatgttaccaaactcgtgacgttatggaagcaatgtcaaaagactctggtatcgatgtccaaagtttacgtgtcgatggtggtgcagttaagaataactttattatgcagttccaagcagacattgttaatacttctgttgaaagacctgaaattcaagaaactacagctttaggtgctgcatatttagcaggtttagcagttggattctgggagagtaaagatgatatcgctaaaaactggaaattagaagaaaaattcgatccgaaaatggatgaaggcgaaagagaaaaattatatagaggttggaaaaaagctgttgaagcaacacaagtttttaaaacagaataaacttgtagattagacttttgtataaacattgtgatacaatcaatttaagttaatatttgaatcgagaaacgagagatttgttcgaacatgtacaattgaaggattgtttatgtgggacaagtctctcgtttttacattttttaggaggcgttttggaatggcattgtctacttttaagagagaacatattaaaaagaatttaagaaatgatgaatatgatttagtaattattggtggcggtattacaggtgcaggtattgcactagacgcgagtgaaagaggaatgaaagttgcattagttgaaatgcaagactttgcacaaggaacaagctcaagatctacaaaattagtccatggtggtttacgttacttaaaacaattccaaataggagtagttgccgaaactggtaaagaacgtgcgattgtttatgaaaatgggcctcatgttacgactccagagtggatgcttttaccaatgcataaaggtggaacatttggtaaattctcaacatcaattggtttaggaatgtatgatcgtttagcaggtgttaagaagtctgaacgtaaaaaaatgttatctaaaaaagaaactttagctaaagaaccattagttaaaaaagaaggtctaaaaggcggcggttactatgttgaatatcgtactgacgatgcgcgtttaactattgaagttatgaagcgtgctgccgaaaaaggcgcagaaattatcaactatactaagtcagaacacttcacttatgataaaaatcaacaagtaaatggtgttaatgttatagataaattaactaatgaaaattatacaattaaggctaaaaaagtggttaatgcagcaggtccatgggttgatgatgttagaagtggtgattatgcacgcaataataaaaaattacgtttaactaaaggtgtacatgttgttattgatcaatcaaaattcccattaggtcaagcagtatactttgatactgaaaaagatggaagaatgatttttgcaatcccgcgtgaaggaaaagcgtatgtaggtactacagatacattctatgacaatatcaaatcttcaccattaactacacaagaagacagagattatttaatcgatgcgattaattacatgttccctagtgttaatgttacagatgaagatattgaatcaacatgggcaggaattagaccattaatttacgaagagggcaaagacccttctgaaatctctcgtaaggatgaaatttgggaaggtaaatcaggtttattaactattgcaggtggtaaattaacaggctatcgtcacatggctcaagacattgttgatttagtatctaaacgcttgaaaaaagactatggtttaacatttagtccatgtaatacaaaaggtctggcaatttctggtggcgatgtaggtggtagcaagaactttgatgcgtttgtagagcaaaaagtagatgtagctaaaggattcggcattgatgaagatgttgcgagacgtttagcatctaaatatggttcaaatgttgatgaattgttcaacattgcgcaaacatctcaataccatgacagcaagttaccattagaaatttatgtagaacttgtttatagtattcaacaagaaatggtatacaaacctaacgatttcttagttcgtcgttctggtaaaatgtacttcaatattaaagatgtattagattataaagatagtatcatcgatattatggctgatatgttagactattctccagctcaaattgaggcttatactgaagaagttgagcaagcaattaaagaagcgcaacatggaaataatcaaccagcagttaaagaataattaatttgtacaatcataaactgttgtcctgttttaagggcatcagtttttttatatgagatacattagtcaattgaaactatgcatcactaaatgtatgataataataaaagcgaatataaaaacgttgttattaaaggtgtgagatgatgactgaaaaacaatttaaattaactgtacaagataatacgaatattgaagttaaagtgaattttacagatgtagattcaaaaggaattattcatatatttcatggtatggctgaacatatggaacgttacgataaattagcacatgcactttctaagcatggcttcgatgtgatacgtcataatcatcgaggacatggtattaatattgatgaatcaacaagagggcattacgatgatatgaaacgagttatcggtgatgcctttgaagtagcgcaaacagtgagaggcaatgttgataaaccatacattataatcggacattcaatgggatccgttatagctagattgtttgtagaaacatatccgcaatatgttgatggtctaattttaagtggtactggtatgtatccattatggaaaggattaccaaccgttaaggtgttacaactgattacaaaaatttatggtgccgagaaacgggttgaatgggttaaccagttagtatcaaatagttttaataaaaaaatacgtccattacgtacacaaagtgattggatttctagtaatccaactgaagtagacaactttattaaagatccatatagtggatttaatgtgtcaaatcaattattatatcaaacagcatattatatgctacatacatcacaattaaaaaatataaaaaagttaaatcatgccatgcctatattattagtttcaggatatgacgatcctttaggtgattatggtaaagggattttaaaattggcgaatatatatagaaaagccggcattaaaaatgttaaagttaatctttatcatcataaacgtcatgaagtgttatttgaaaaagatcatgacaaaatttgggaagacttgtttaaatggttgaatcaattttataaaaaataaagaaagtggaattaaatatgaataaaaataagccttttattgtagtaattgtggggccaactgcttcaggtaaaacagagcttagcatcgaactcgcgaagcgtatcaatggtgaaatcataagcggtgactctatgcaagtctacaaacatatgaatattggaactgcaaaagtaacacctgaagaaatggatggtattccacatcatttaattggtatcttgaatcctgatgatacattttcagcatatgaattcaagcgattagcagaagatttaattactgatataacgaatagaggtaaagttccaatcatagcaggtggaacaggcttatatattcaatcattaatatataattatgaattagaagatgaaacagttacacctgcacaattatcggtagttaaacaaaagttatctgcattagaacatttagataatcagcaactacacgaatatttagctcaatttgacgaggcttctgccaaaaatattcatccaaacaatcgacagagagtattgcgcgctatcgaatactattttaaaacaaaaaaacttttaagtaatcgtaagaaagtgcaacaatttactgaaaattatgatacattattaatagggattgaaatgtcgcgtaaaacattatattcaagaataaataaacgtgttgatattatgttggatcacggattatttagagaagtgcaacaacttgttgaacaaggctatgaatcttgccaaagtatgcaagctattggatataaagaattaatacctgtgattaacggacaaatgatttatgaagatgctgtcaatgatttaaagcaacattcacgccaatatgcaaaacgacaaatgacatggttcaagaataaaatgagtgttcattggttagataaagaaaatatgtcacttcaaatgatgttagatgagattacaacccagattaagtaaaaggagtccgacagatgattgcaaacgaaaacatccaagacaaagcactagagaattttaaagcaaaccaaactgaagtaactgtattctttctaaacggtttccaaatgaaaggtgttattgaagaatacgacaagtatgtcgtaagcttaaattctcaaggcaaacaacacttgatttacaaacatgcgatcagcacttatacagtagaaactgaagctcaagaatctactgaaagtgaagaataagttgtaatcatatgggcacgatttaatgactcgtgtacataacgtttgaagtatgataaatagatatagaaataaagtcatatgtgacatcaattaaatgatgctcaaatgacaagatacaatagaggaatgtttgtaataaaaacgcttcatataaaggtcgagtcaatatatgatacgactttatatgaagcgttttatttgctatgagctagtatattttataataacttttctatttctctttcgatttgaacaggttttttttgaggtgcaaatcgtttaacaacgttaccttcacgatccactaaaaacttagtgaaattccatttgattttctcattaaagaatccatgttgtgccgcagtcaaatatctaaataaaggtaattgatgttccccttttacgtctattttttgatgcatagggaaggtaacaccatagtttaatttacagttttgagctgcttcctcgcctgaaccaggttcttggccaccaaattgattacaagggaaacctagaattacaaacccttgatctttgtatttctcgtataatgattgcaaaccttcgaattgtgaagtaaagccacattcgctagctgtattgacaattagcataacgtcacctttatatgcatctaatttgtaagtaacacctttatttgtttctactacaaaatcataaattgtctccattgaatcatcctttcgatttacttaaaatgtaccataaaatcgtgtaatagtctttactaaaactctatgatagaatactttgagtaggattttattaaggagatgtataacatggctcagcaacaaattcatgatactaaaaataaactagaaaaagctgtattagtcggtgtacatgctcaagatgataagcaatttaattttgagtctacaatggaggaattatcatctttatcagagacttgccaacttgaagtgttgggtcaaattactcaaaacagagatcgtgtagatcgcaaatattatgttggtaaaggtaaaattgaagaaattcaagcatttattgagttcaaagatattgatgtagtcatcacaaatgatgaattaacgactgcacaatccaaatcactaaatgaagctttaggtgtaaaaattattgatagaactcagttgattcttgaaatatttgcattaagagcaagaagtaaagaaggtaaattgcaagtagagctagcacaacttgattatttattacctagattgcaaggccatggtaaaagtctttctcgtttaggtggcggtattggaactagaggccctggtgaaacgaagttagagatggatcgtagacatattcgaactcgtatgaatgaaataaaacttcaattgcgaacggtagaagaacatcgcgaaagatatcgaaataaaagaaatcaaaatcaggtgtttcaagtagctttagttggttatacaaatgctggtaaatcatcatggtttaatgttttagcaaatgaagagacgtatgaaaaagatcaattatttgcaacgttagatcctaaaacacgacaaattcaaataaatgatggatttaatttaattatttcagatactgttggttttatacagaaactacctacgacgttaattgcagcttttaaatcaactttagaagaggctaaaggtgcagatttattagtacatgtcgtagatagtagccatcctgaataccgtacgcagtatgacacagttaatgatttaatcaaacaattagatatgagtcatatttctcaaatagttatttttaataaaaaggacttatgtgatcatgcatcaaatcgtccagcaagtgatttgcctaatgtttttgtttcatctaaaaatgatggtgataaattacttgttaagactttatttattgatgaaatcaaaaggcaattaacttattatgatgaggcaattgcgacgaataatgcagatcgattatattttctaaaacaacatacattagtgactgaacttaaatatgatgaaattgaaaatgtttatcgtataaaaggatttaaaaaataataaaaggacgaaattcaaatgaaagatataagtaagatagtagctgacgtcgaatcaacgttagcaccatattttaaagaaattgaagaaactgcatatattaaccaagaaaaagtattaaatgcatttcatcatgtcaaagcaaccgaaagtgatctacaaggatcaacaggatacgggtatgatgattttggacgtgatcatttagaagaaatatatgcgcaggcatttaaagcagaagatgcaattgttcgcccacaaattatttcaggtacgcatgcgattactattgcattacaaagtttattaaaacatggtgatgaattaatttatataacgggaagtccatatgacactttacttgaagtcattggtgtaaacggaaatggtattgaaagtttaatggagcacggcgtatcatataaagatattgcacttaaagaaggtaagatcgatattgaaagtgtgttagatgggatttctgagcgcaccaaagtaatagcgattcaacgttcgaaaggctatgatcaaagaccttcaattcctctaaatgaaattgaacaggtgattactaggttgaaagaagtgcatcctaatattttaatatttgtggataactgttatggggaatttgttgaaagacgtgaacctatagaatgtggtgccgatttaatagcaggatcattaattaaaaaccctggcggtggtttagctaagattggtggatacattgctggtagaaaagatttaattgaacgatgtggttatagattgacagcacctggtattggtaaagaagcgggtgcatcattaaatgcattgcttgaaatgtatcaaggtttctttttagcaccacacgttgtcagtcagagtcttaaaggtgcattgtttactagtttatttttagaaaaaatgaatatgaacacaacgccgaagtactacgaaaaacgaactgatttaattcaaacagttaaatttaaaacgaaagaacaaatgatttcattttgtcaaagtattcaacacgcatccccaattaatgcacattttagtccagaacctagttatatgcctggttacgaagatgatgttattatggcagctggtacgtttattcaaggttcatcgattgaattatctgcagatggacctattcgtcctccttatgaagcatatgttcaaggaggattaacatatgaacacgttaaaattgctgtgacaagagctgttatgcagttgaaagaacaaggacttatataatagattaaatttcaccctaaatgataatatgttttgggtgaaatttttttgcgaatatttatcagattatttttaaaaattgaaaaaatattttagctgtaggtcgttttatggcgttttagaggtcgaaatcgcagttatatcaatgttttgagctttatgttagaaaacctgacatatttttgaaatcctaaaaaaattatgataagttattaacaagttcaaaagtagaggagaggaacaatgatatcgaatgatgcaatcagacgaaatatggctgtcttctctatgagtgtagtaagtaagttaacggatttaacgccaaggcaaatacgttactatgaaacacatgaactcatcaaacctgaaagaacagaaggtcaaaaacgtctgttctcactcaatgatttggaaagattactagaaattaaatcattattagaaaaaggatttaatatcaaagggattaaacaaatcatttatgactcacaagagcatttaacaacagatgaacaagagataagaaaaaagatgattgtagatgccacgcaaaagcctattggagaaactttgccaataaatcgtggtgatttatcccgatttattaaataaaatttggaggattttaaaatgccaaaacgtactttcactaaagacgacattcgtaaatttgcagaagaggaaaatgtaagatatttaagattacaattcactgatattttaggaacaattaaaaatgttgaagtgcctgtaagccaattagaaaaagtacttgataacgaaatgatgtttgacggttcttctatcgaaggtttcgtacgtatcgaagaatcagatatgtacttacatccagatttagatacttgggtaatcttcccatggactgctggacaaggtaaagttgcacgtttaatttgtgatgtatataaaacagatggaacaccatttgaaggggatcctcgtgcaaacttaaaacgtgtattaaaagaaatggaagatttaggcttcacagactttaacctagggcctgaaccagaattcttcttgtttaagttggatgaaaaaggggaaccaactttagaacttaatgatgatggtggatatttcgatttagcacctacagatttaggtgaaaactgtcgtcgtgatattgttttagaattagaggatatgggcttcgatattgaagctagtcaccatgaagttgcccctggtcaacatgaaattgactttaaatatgcagatgctgttacagcatgtgataatatccaaacatttaaattggttgttaaaacaatcgcacgtaaacataatttacacgcaacatttatgcctaaaccgttatttggtgtgaatggtagcggtatgcactttaacgtttcattattcaaaggtaaagaaaatgcattcttcgatccaaatactgaaatgggcttaacggaaacagcatatcaatttacagcaggtgtacttaaaaatgcacgcggatttactgctgtatgtaacccgttagtaaactcatataaacgtttagtacctggttatgaagcgccatgttatattgcatggagtggtaaaaaccgttcaccattaatccgtgtaccatcttcaagaggattatcaactcgtattgaagtacgttcagttgacccagctgcgaacccatatatggcgttagctgcaattttagaagctggtttagacggcattaaaaataaattaaaagttccagaaccagttaaccaaaatatttacgaaatgaaccgtgaagaacgtgaagcagtaggcattcaagacttaccttcaacactttatactgcattaaaagcaatgcgtgaaaatgaagttattaaaaaagctttaggaaatcatatctataatcaatttattaattcaaaatcaattgaatgggattactatagaactcaagtatctgaatgggaaagagatcagtacatgaagcaatattaatacgctaaacaatgatgggaaatcagtaatatcaagggctagagcgttttgctttagctcttttttgatttggaaaggtggaatttcacttgaccacttttgtaaaaaaatggatttggtcaagttttggtcaagtaaatgttttatgtatttatttttttaaagctggggaagaccattttatattttagttcacatgaattttaatatatttggaggtgatgagatgaggtgataaaagaacgtcgcgaaaacgttgagtattacttgaaaatagccacattcatattacttctcatcgaattcattcgcagaacgttctaaggtaagaccccgaaaagaggggccttactactcattattaagggggtaatactatatgaaaagagaaacaaaacaaaaaatatctttttgtttatcgatcggtattttcattttagttatactactattgatattctaaaaaattaaaaatttttgcctcatctaatttatgaattgctatgatgaaatatacaatacaatcaaaaaattgatagaaaacaaagagataacgagttatcaaattaataaagatactgggataagttacggtaatattaatgctatgcgccgtggagaaagaagaatagaaaatttaagcttaaagaatgcaaagatcttatatgaatatgcgaaaaaggtattataatataagcattgagttcaataggcatacaataactgcccaaactagtgactgagtgggtgtttttatagtattaaaagttttctaaaagtgaaagaaatcatgtttagtgatttacttatgtttttcaaaatagtataataattttatataatatatagaacttcagtataccttttgagtatatatggagttctttcttttttacaagatgtatatgtataaatggaaatgtttattacattacataaaaacctttaggtgctcttagatggatgttaatcataaaacaaagtgattttgaaaaatataggttattataatttagaattgcaaattataaatcttgtcattggatatgggaattcaaacatatcacttacaacaatttgtggaatgttaaataactataaagaggaaaggagaaaaaatgataagaatggttaaagaaaaagaacgaatagcaaaattaaatttcgaatagctgtgacgagcataataattcaagtgcttaattttatcaaatcgttcttttaaaaaggtaaagaacaaaagacctttaccacattaaatagggaggtggtatttatgacaagagaattaaggaaaaaattaactctctatcttaacattgcaactttaatattatttattattaatttaactagaaaaaaataaactattctttcatttttacaaaaattatgaaccagtttaaagaaatttataatacaatagaaaaattactaaatgataaatcaatatctaattatagaattaatcaagacactggtgtttcttatggtggtataagtgaattaagaagcgggaaaagaaaagtgaataatttaactttagaaacagcggaaaaactctataattaccaaaaacaattagaaataatgattgaagattaaaataaggccatatcttttgaaatatcatggagtgagccttttaaatcatctaattttaaagtatattaaatatggatagcttaatgtgaatataaataaaaaaattatcaaataatataatatagaatagattgagacaagaaattttatcaatatataataaaaaacgccaatactattaggcattagtttatgaattaactagtttggcaactacaaagaaacaatgtattgctaaacgtagttactgcattaggataattataattataaatagaaagagagcgtgattaaaaatgaatgagattgaaactattataagtgaaatagaaaagttattaactaacaatacaccatatagtatttcaaaaaactcaggtgtaccacgtcaaacagttactgatttaaaggtaggtaatactaaaataaaggatgccaaatttaaaacaataatcaagttatatgagtatcaaaagtcgtcagaaaataattcagagtgctaataaatataccttgtttgattagatggacaagagattaaatttctattaatttcatgattgtgtgtccacactttgttcacctcaataaaattatctctaggtttttaaaattgtacatgtttaaacaatcaaaagtatgcattattatattatcatttccataaaaatttaaatgatctttaagtgatgatatagaaggctgaacacagtaaataagttaactttaatgcagtattctatactatacatattttgtaataatgtttatgcgcataatttttcattgataattttttatattagattgtgtaattggcatatatgatgatttgtgataattatattctaatatagcatttgattttatgatttttaaaattaatagatttgaaaagtatactttatttcatgaaagtttttggtacatttatttgaaaatgtttttattacaaagttacatgcctaaatgtttcttaacaaaattaattcatcaagtgtaaagaatcgtgtggtaaacataatttatatagattataaggaggtgaaaatggtcgaggaagtaaaaacgataaaatagtttgaatgttttgattttaattctgataggactattgaatttgcaaactaataagaatgtgagatttgatttaatacgaagtcatattctttgaataaaatattactttctcaccattagtaaaatgaagataactattaaagtgcgaaaaacaaataaaaaagagaaaatagaatttttaatagggacgtttataattattttagtaatattagggttcaaaattatgaaataaatgtatagtatttgagaagtctatatgactccggaaaaattaaagtctaaagatatctctatatctcaaatttaatagactactggagttagtagtttgaatattgaaagacactaatctaataaaaatacataaaaggttaaacattgaagtttagtaaaagacgtaaggtatacaagacaaatcgtttgtctttgataaagtaattgatgatgaaaagtcgttaatatgtagaaacaaaaattgaaaatatgaaatttaactattatgaagtgatgatagccattaatgaatagaaaaataataaaatcatttataaataaaaaatacgttgagttcacagaatttcgaaaaaaagtagtaaacattgtacagatatggagatgaaaaaaatgtcagaatacaagaaaaagataattgaattaattgaaagtaatttaacaggatatgaaatttctaaaaaaactggagtttctcaatatgtactttcacaattaagacagggcaaacgcgaagtagataatctaaccctgaatacaacagaaaaattatatgaatatgccaataaagttttgtaatttaactactgtataaattaatcaagctatgtttatttgatttaactattaataaaaatcatatggtgaatggatattataataattaaaatacaaaaatagtagattccaatttgtgaaaaaggagtatgtcgtttcatttagaatttattgcacgaaattagcatcgaataagggaaaataagtgttaagttttaaatgagttgatttgtcaatttaagtgcaacagttcatcacataaaacttcataaggaaacttccaatttaaacactttcttggtcgataattaattgagtctaatgcatagttaagttgctcttgatttactttagctaagtctgttttcttaggggaaaattctcttagtaaaccattggtattttcatttgtacctctttgccatgcggaatatggatcagcgaagtagacattaatattaaattggttttcaatattttgataacaagagaactctttccctctatcgacagtaatagttttaacggcacctttaggtagatgtttgataaggttattaattgccgtctccatagaattagaggaacgatcaggcataagtacacaataataataacgtgattttctttctgcgaaagtagcaatgcaccctttacttttgcctctgctggatacaattgtgtcagcttcccaatgaccgaatgtattacgtttctttatttccttaggacgttgtgaaataggacggccaatattaaacttacctctagtttctttaggtttctgtctttttcctttttgacgaaggcatgaaataagttcgaaattaatcatattagagttaatccatcgatagatggttttaaaacagatttggttttgtaatagacgacctacgatttgttcaggagaccagtggcattttaaataatatttaatgatattaccaagttctggagtaaatcgagtaggacgaccacaaagttttcttttggtttcataatttttttgagctgtttcagcttgatatgactgatttaaattattcctactaatttcacgtgagatagtagatacagatcgttttaatttacgtgcaatagatcttaaagaataattttcttgacgtaaaacctctatacgtgcgcgttcagttagtgtaagatggttatagctcatgttggcactccttgtatgtgtttttgtggttattaacatcttacaacaaagtgccaattatgggcattttttatgaatttttataggtgttgcacttaatattacaatccgtcatgataaaaaagattggaatggatcgtcttgaaatgctcccttcaaagttttcattttttcaatgtctacttcgaagggggcatttccattaaatttttatagctttttatatttatataatgagcatataagtttaagtaagtgcgagtgaagggaataaaaaagctcaaatgtaccaaattgttaatcttaataaatctctactttataaagattgaatggacattcgagcgttaatcagtcaggagggactttccctcctacaatttaataataatacttgcttcaccactgtacaaggagtgattagttatgttcaaagtgaattattcgattttaagttattatccagatatttatctccatagtaatttagctgtaggtgtggcatttgaaattataggagaaagttatcataagaatgaaattaaatttataacccaaagaagaaaaattttatcatttgatgatgaaatagacaatttagaacttattaatatgtttttggatgggcttaaatgtgaattcgaacaaactaatcaatcattaaaaagttataagaaaaagtttgttaataatttctactttgagaatattgaatataaaatgtttgactcattaaaagaagttaataattttattgaaaatacatataaatatgtattacatcatggtttagataaaaaagaaagacttaagaaaactgagaaagaacttttgaatagctaagtaaaaaggtcaaacatattgttctgaatataaataagtaataaccgtacctttattgatgcggttattttttatgtaaaaaaacgaaaaaagtttttaaaaaagtgttggatacaaaacaggttggaaagagaagaaaaaatgacaaatatcgcaaaagccaaaagcgaaatcttccgcaactacactttaggctttgcaacacttgccacaataataaaatgttttttatagagggggatatcccctcccacgtattatattacgaggtgatgaaaatgacaaacttaactaaaactagaataataatctttattaattatctaatcggaattttagctttaatatttgccttttatataatcttaatgtcaatagcggtttaaaaatgctgttttatggaggtttgaaaatgtcgttttttagtggtttaagattgtcgtatatttaatgatttttcggttttataatcttttaatcgatatgattctccagtaattttaaatacttttgaatggtgaactaaccgatcaattatagctgctgatacaatcttattactaaatgactctccccaactcgaaaatggaatattagtcgtaattattgttgatttccattcataccttagtgacattaactggtagaataaatcagcttgttctttggtgatggcagaataacaaatttcatcaatgataagtaactctattctgcttaattgttttaatgttttattaatgatttctttggaatctgtgacagttaataagtctattaattctttgaaagtatagaatctagtctttatattttgtttacatgcctcaattcctaatgagattgttaggtgtgttttaccaacaacactgttatctaagaaacaaatatttatactatcttcaaaaaaatgttatttttttagtctcattttgtattttatttttacagtattcttctagaatattatatttaccttcataaccctttttctccatatatttaaaaatggccatagctgtatatcctaattcaatttttttattattaatttctttaaatgaatctagctttgatgctttcttattttgttgtcttttcttcaatcgttctaattcattttattttcctgcttcataatattttttaactgttcttgaatcacaattatattgtcgaccaagctcagcataatttggtttaatacctttcataatgtaaaatagcattccttcataaatgtcatgtctcaattaaataacttccaatcgaagattgagttaagacatgattatataatttaaaaaagaaaaaaatgtattataaatcagtacgtcaaaggaataaggatatagaagtagatataatttctaaaaataccaatttgaattaaaacctagttaaaagagcttatgaatatttgtttgagaataaatataattattactatagagaagcacatgggattgtagaaagaaaatacaatttttctaattatattgagaaatagggtgatttgattgattattatgaggaagttaaaagaagataatcaagttatagtatatgaatatattccacaagataaaatagaaaaagggaaaggcgaaataacagtaaataaattagattcaaaggtaattgactataaattatcaaaagttgaaaatgaaaaaggtattttaatttatagagataaatcatttcatgcaatattaaattttattgatgaaaataaatttccgaatgaatatatatatgcatggtattaaagcatcctttctacacagataaagagaaagtggtgctatttttatgtgtttttttaactaattactgaaatagcagaatcacaaaagttaacatatttaaaagaacttggtgaagatggcgaatataaatatgttgccaaaatagatagtgaaacatctaaattatgtcattcactcaacggaaaaatatttaaagttaaagatatgataccaggtgtgaatgcgccacctatgcatccttggtgtagaagtaccacagtgccacatgttggcaattggcgagacaagttctttaaagagcgtgaaggtaaatatcaagtagaagtaaaagaagcaaaattacaggaaaaagctaaaaaccagatgaaagaaatgattgaaagtggtaaaataaaaatagaaataaatcctgaaaaacagaatagacattctttaggtcataaattatatttaaaaaataaaatttatgcattgcagaatgatgagaggtttcctagctatacaatactctctatagaagaattaaatgatttattaaagaaatactcaatgactggcaaaatattagtggataaatttggatttaatcgtaaggaaataattaatttcgaaaaaactataggaaaagcttatgcaggtggaaaatatattaatactgcatatggtaaaatacattattctaaaactggttctcatatagtaccatttgtaagtaaggagaagtaaaatgttaatcaaagatgtatatcgtaaaaatgttatagttacactaaaaaatgatgaaaaattaaaaggttttgttatagattttgaaaatccgttagaaagtgattctggtaactattgcatggatttagaaacagatttaggtttttattctattgatgaatcagatattaaagacatacaaataattacagaatagcatcctttctacacagataaagagaaagtggtgctatttttatacatttttttaaccttccaatgtgaaggttattttttattgtccaaaacgtgctgatgacattttaaaagcaagtatggaatatcagtcgacagactataaacggaggtatatctcatggaaaaaaatgaaagtaatattactgatgtaactcagaacgaagagcaactagacaacagtgatgaacaatcacaacagaatgagaaaacattttctcaagaggaagtatcacaattgattaaagagcgtatagctagagaacgcaaaaaatcagatgaacgtattaaaaatgccaaagaaaacaatgatagcaatgaagtagcttatttattaaaaggtgctaaagttacaaaagtatatggcgatcaaaatagtgtatcttttgtgccaggggaaaaagcaaccgaattattatttgacagtaaaccgaattcaattgttatgttacataaccatcctggacagtcaggattttcattgaatgatttagcagtttttactattaataattctattaagactatgacaattgtaactaataaaggacgtattaaatttataagtaagacagaacattttaaagaaaaagtaatgaaaaaaatgatagcaaacttattaatagaaaaatctctagatgtaattagtacaaaagatattgaaaggttattaaaagagttatacaataacgataatataatataaagaaataggtgattaaaaggtgacaatgatgttagacggtaagttatctaaaaaagaattgctcaggttgttaactgaaaaaaacgatgaaaaaaataagggaaaagagaaacaatctaaatagcatcctttctacacaaaaatatagaaagtggtgctatttttatatgcttttttaactatttactgaaatagcagaatcacaaaagatagcttatcttaaagatttaggcgaagatggcgaatataaatatgttgccaaaatagatagtaaaacatctaaattatgtcattcacttaacggaaaaatatttaaagttaaagatatgataccaggtgtgaatgcgccacctatgcatccttggtgtagaagtaccacagtgccacatgtcggcaattggcgagacaagttctttaaagagcgtgaaggtaagtatcaagtagaagtaaaagaagcaaaattacaggaaaaagctaaaaaccagatgaaagaaatgattgaaagtgataaaataaaaatataaataaattgtgggaaataaaatagatatatgttaggtcatcacttatataatgaaaataaaaaaaagagccattttaaataaaaagaaattgcctagctatacaatactttctatagatctattgagtgaattgttaagagaaaaatgtcaacaggcaatctaatattaagtgatgagcgatttgatttgaaagatattattaattttaatcaaattattggaaaaatacatattggaaatgtgtatattgaaaccataaagggaaaagtgcattattcgaagacaggtgctcatatagtaccttatattgataagtaggtgaaaagtattgagaattgaagatgcatatcgtaaagatgttattatcacgcttttgaataatgaagaatacgaagggtttgtaactgactatgaaaatgaatttgagagtgaaacaggaaatcttgttgtagatatacagaccgattttgctgtttattcgtttgatgaaactgagataaaaagtattagattattaaaataatttctaaatagcatcctttctacacagataaagagaaagcggtgctattttttgcgcttttataactatttactgaaatatcagaatcacaaaagttaacatatttaaaagaacttggtgaagatggcaaatataaatatgttgccaaaatagatagtaaaacatctaaattatgtcattcactcaacgaaaaaatatttaaagttaaaggtatgataccaggtgtgaatgcgccacctatacatccttggtgtagaagtaccacagtgccagatgtcggtaattggcgagacaagttctttaaagagcgtgaaggtaaatatcgggtagaaggttcttttattgaatcgggtgcacttaataataaaagtgatgaatacggtatcaaaaggaacaggcatgctcaaatttattataattcagttagaaatcaagaaaacagatagagatttctaaaattgctaaaaatactaatataaataaaaatacaattcaaagagtttatgaacatatatttgaaaataagtatttattagaaaatggatttaaacaatttgatcctgacttttatatggctcaaagttggcaacgtttaagagaagggaaaaatattaaaaaatggatataataatgttgaaacatgaagctcttgaacactatctaatgaataagtataatttacactatatagaggcacataaacttacagaaataaaatataattatagtattttaattaattagaggtggaaatgattgctaatattaaaaataaaagaaattaatgataaaagtgttacatataaatattttcctaataatgatgaaaatattaagccgggtattattcaaatggatatagatagccttgaagttatcaatgctgaaaaatctagtttagaaaaaaatacaagagacaattattttattcatgccatagacagaatatacataaatactagtaaagggctatttcctgaatctgaactcgtagcatggggataaagaaagtttacttttaaaaatttcatatttaattttaaaaattttaaccttccaatgtgaaggttatttttattgtccaaaacgtgctgatgacattttaaaagcaagtatggaatatcagtcgacagactataaacggaggtatatctcatggaaaataatgaaagtaatattactgatgtaactcagaacgaagagcaactagataacagtgatgaacaatcacaacagaatgagaaaacattttctcaagaagaagtatcacaattgattaaagagcgtatagctagagaacgcaaaaaatcagatgaacgtattaaagatgccaaagaaaacaatgatagcaatgaagtagcttatttattaaaaggtggtaaagttacaaaagtagatggcaatcaaaatagtgtatcttttgtgccagggtaacaagcaaccgaattgttatttgacagtaaaccgaattcaattgttatgttacataactatcctggccaatcaggattttcagaatatgatttatttacattttttaagcatccatcaataaaatcaatgacaatcgttactaataaggaacaagtaaaatttattaccaagtcagataggtttcaaggtaaaatagtgagtaaattttgtactaaatattttacgcatattaatatcattaatgatagctatattgaaaaattattaaaaaaactttatagtataaatatgattaaatataaagtgagatgattttaattatgattgattcacaattagatggaaatgtaactgcaaaagaattgagtgaatcttttaaagaattagttgaagaatttgaacgcatagaaaaagcgaataagaattcaaattcaaaagataaatagcgtcctttctacacagataaagagaaagcggtgctgtttttatacacttttttaactatttactgaaatatcagaatcacaaaagttaacatatttaaaagaacttggtgaagatggcaaatataaatatgttgccaaaatagatagtaaaacatctaaattatgtcattcactcaacggaaaaatatataaagttaaaggtatgataccaggtgtaaatgcgtcacctatgcatccttggcgtagaagtaccacagtgccacatctcggcaattggcgagacaagttctttaaagagcgtgaaggtaaatatcgggtagagaacaatactgaaatgaaattaggtgaagttcattattctaaaactggttttcatgtagttccgtatattaaaaaggagtgattaaaaatgaatttacagtcatacataggcaaattagtcaaattaacgcttactaataataaaatattaattggaaaagtgatagactttgatgataaaattgataattttgatggttataattcgatagaaattgatacaggtagaattacatatgatatatcagaaaataaaattaaagacatacaaataattacaaaatagcatcctttctacacagataaagagaaagcggtgctatttttatacacttttttaacaactaaggatacaagacacataccttcaacaatatcctcatctaaacctatcgatttcctaagctcaattttaaacacaaagtttatttgtaaagatgcacacctataaaaatcttaatcatcgaaaagtcacaaacatctccatattaaaaacttaaatagtgcattccatttaaactaaacatcgatatttctaccaatatagacttagtaattcgattgttaatacattactttcataaaataactacaaccatcataatacttctcaaatctcgtcaaattaaagtaaatacagcacaaattaacaattttaaatatataaaataaaacaagatactcaataatctgtagtaccttgttttggaataatgtaattttatatcatcaacggctacaaatgagcagtttcatatataaataaacacaactactcaactgatcttgattaattaataaatgatttgccagatgacatataacagcattattagattaattctaatagtttatttaaattttcttcggttgtcgcccaactggttgcgaatctaacaacacgatgttgatcatcgtatttttcccaaacagcaaatttaactttttgttctaactctgctattttctcgttacttaaaataaaaaattgttgattggttggagaatcaaagtaaagacgatagcctttatttataaacccgtctttcatcttatttgccatttcgatagcatgtctgcttatattaaaatataaattatccgtaaataattctaaaaattgtatgcctgttaaccgtccttttgctaaaagtgcaccgtgatgtttgattcgagtggtaaattgtttcggttcattattcttcgtaaaaacaattgcttctccgcataatgcacctatcttcgtaccacctatataaaatacatcacaatatttagcgatgtctttaatagtcatatctgattgatcactcatcaatccataccctaatcgtgcaccatccataaataatggaagctgatattgcttacatactttgcataactcttccaattctgatttagagtataatgtgccatattcagtaggatgagaaatatataccattcctgggaataccatatggtcctttttaaaatcacttttaaatgtctccatgtaagtttcaacatctgaagcactaacttttccttccttagagggtatagtaattactttatgtccactatattcaattgcaccgccctcatgcacagcaacatgaccagtgtctgctgaaatgaccccttcgtaactttctaacattgaattaataacaacctgattggtttgtgttccacctactaaaaaacgaattgtagcatttggacagtcaattgtatctttaatcttttcaattgcctgagctgtgaattgatcaaagccatatcccgaagcttgtacaagatttgtatctactaatcgttttaatactttttcatgagcaccttctaaataatcattttcgaatgaaatcactacatttccccctaaaactaatatcaacattttaataagataaaccaatttcaaaactagttcgatatttaaaatgtattatgaatggttaaagtttgtatcgcattatcgcgaagttgaataaatatattatacatcaaacaatacattatgaaaattaattaattttttaccacaattactttgcgtgccgaaacacatatattaatgattgaattttactgttaaaagttctatgatttaggaaatagagaaaagaggggatttaaatggaacaaattaaacttaaaacttttacatctgagactttagaattattagaatcaaatattaacgaatttttaggttctgaagaagctgcaaatttgaaattagtaaatattacaataaaagaaattgaggaaagaacatttccaaataatgaagaagagtttaatgcaatattaactctatctgtaaataaataatctggaacgaaaggtacaaaagttttttgtgcctttctttataggagaaataaactatgcaattttcattttcaaacgatttaggaacgttatttactattattttagccattggattcatcattaatttagtattagcttttattattatctttttagaaagaaataggcgtacagcgagttcaacttgggcatggctatttgtactttttgtcttacccttgattggttttattctttacttgttttttggtagaaccgtttcggcacgcaaattgaataaaaacaatggtaacgtgttaacggatttcgatggacttttgaaacaacaaatagaaagctttgataaaggtaattatggtactgataacaaacaagttcaaaaacatcatgatttagtacgtatgcttttgatggatcaagatggttttttaactgaaaataataaagttgatcatttcattgacggtaatgatttatacgatcaagttttaaaagatattaaaaatgcaaaagaatatatccatttagaatactatactttcgctttagatggtttaggtaaaagaattttacatgctttagaagaaaaattgaaacaaggtttagaagtaaaaatattatatgatgatgttggttctaaaaatgttaagatggcaaattttgatcactttaaatcattaggtggcgaagttgaagcattttttgcgtctaaactaccattattaaatttccgtatgaataacagaaatcatagaaaaatcattattattgatggtcaattaggttatgtcggaggatttaacattggagatgaataccttggtttaggtaaactaggatattggagagatacacatttacgaattcaaggagatgcagttgatgcattacaattgcgctttattttagactggaattcgcaagcacatcgacctcaatttgaatatgatgttaagtatttccctaaaaagaacggaccattgggtaattcaccaattcaaatagctgcaagtggcccagctagtgactggcatcaaattgaatatggttatacaaaaatgattatgagcgctaagaagtcggtatatttgcaatcgccttatttcattccggataattcatatataaatgccattaaaattgcagctaaatcaggtgtagatgtacatttaatgattccatgtaagccagatcatcctttagtttattgggcgacattttcaaatgcctctgacttattatcaagtggtgttaaaatttatacgtatgaaaatggatttatacattctaaaatgtgcttaattgatgatgaaatcgtatcagtgggcacagcaaatatggactttagaagttttgaattaaattttgaagtaaatgcctttgtatatgatgaaaatcttgctaaagatttaagggtggcttatgaacatgatattacaaaatcaaaacaacttactgaagaatcatatgccaatagaccgctgtctgttaaattcaaagaatcgttagctaaattagtttcgccaattttataatttatttgtaaggagtctcgattatagaggctctttttattttatccaaattaaataacgataaatatgttatgtaaacctaatgatgacatttgtcatttcaaatctatgacaaagtatcctattttaaatcgaataaatttactaatcttaaattaataaaatattaagaggtggttcatttgattcaaatatctaatattaataaatcatttaagaaaaatcgtgttttaaaaaacatttcatttgatattgaaaaaggtacatgtaccgcattaatcggaaaaaatggtgctggaaaatcaacattagttgatattttaagcaataaaataattgctgatgatggcgtgattttggataaagacaaattattgcaaagtgaaaatcgcagtataatgtttcagaaaacgatgtttccagatcaattgaaggtaattggaattatcaaattatatcaatcattttatgaaaatccattaacattggacgtaataatagaactaacaaagtttaattctaatcaattgaatcaatttgcaaataaattatctggaggtcaacaacgattacttgattttgtaatatctttaataggacaaccacagcttattttgttagatgaaccaacgtcaaatatggatattgaaatgagagaatatttttggtcaataatagctaagttaaaagaagaaaatcggacgattctttatacatcgcactatatagaagaagtagagcgcatgtccgacaaaattattttgatagaaaatggagaaatcaaacttaatgattcaacgtcacatattagaaccaatcagcaatctcagattacgttatccgatgaatataaaagaaagttaaaaccagataaagatgatttagttattcaaaaaaatcataatggcactatcaaaattattacttcaaatgtaaatgatacgattttatatcttcaacaacttcatattaatttggatgatattgaaatacaaaaagtctcaattgttgattcatacttcaacaataaaaagcaaaggggatctaattatgatactaagttacttgaaaatcgaatttaaagttatactgcgtaaaaaaacaacattaatattatctattttatttcctgttattttctatatattatttacttcgatattggatttgccggaagatgttaaacctaaattttataaagagtatatgtatagtatgacggtttatagtttgttaagttttagcttactaacttttccattagatattattaatgaaaaacaaaatggatggcgccaaagattaatggtaacaccatttacttttactagttattatatttcaaaagtagtgaaaactatgctgcaatttgcaatagcgatattagtgatttttatggttgggcatttttataaaggtgttgaaatgagtgcagttcaatggttagagtcaggaatatttttatggttaggtgcgtctctattaataacttttggcatattattttctttgttaaatgatattcaaaaaacaagtgctttagccaatatcgtaacaattggattagcagtattaggtggattgtggtttccgataaacacatttccgaattggcttcaacatgttgctcatgttttaccgagctatcatttgcgtaaactaggtgtagatattgcttcaaatcatcatatcaatttaatatcatttgttataatactcttgtatgctttagggagtattatagcagtatattgtattagtcattttaaaagggcggaataaaatatgaaatttttaaaagatacttcaattgctgaaatatcgtctatactttatctaatttttcctattgccggtatattttttaatgaagtatatggtcccacatggttgtatattatatcagtcattgtcttttcgttatcgtatcttatattagttatagtaaataatagacttaatacattaatgttttacattttgttgattattcattattttattatttgttattttgttttcagtgtacatccaatgctaagtttgtttttcttttatagtgcttttgccattccatttacttttaaaaataatgttaaaaaaatggcaactaatcttttcatattaacgatgattatatgttttacaattacttacttagtacataacgactattttgttgcaatgacgatttattatgttgttattttgttaatcgtgtttgataatttaaaaaaagtgaaagatcgtgaatataaaaaagaaatagaagaaaaaaatcggtatattaatacgttaataactgaacaagagcgtcatagaataggtcaagatttacatgatacgcttggtcatgtgtttgcaagtttatcattaaaatcagaattagcttataaaattattgattctgatactgaaaatgcaaaagctgaattgttagcgattaataagttgtcgcgggaatcattgaacaaagtacgcgaaatcatcgatgatataagattaccatcatttattgaagaaattgagagtatctgtaaaattttaaaagatgctgacattcagtttacgtttgaaaataaagaactggcacaattattgagtcctacaaaacaatccattttagtaatgattgctcgtgaagcgataaacaatgtgattaagcatgcaaatgcttcaaaagttcatggtcaattacgagctatgaatgaacataaattacagttcattatacaggataatggagaaggtattgacagcggctgtgaaataaagagtatttcacaacgagtaaaacatttaaatggaacattagaagttgaatcgaataaaggtactaaattaatcatcgaaatgcctacagggggaatagcatgatttctttaattattgcagaagatcaaaatatgttacgacaggcaatggttcaattaattaaactacatggtgattttgaaattttagccgatgtagataatggtctcgatgcaataaaaattattgaggcacaccatcctgatgtagttattttagatattgaaatgtcaggcatgactggacttgaagttttatcagaaattagaaagaagcatttgaatattaaagtgattattgtaacaacttttaaaaggccggggtattttgaaaaagctgttgcaaatgatgtggatgcatatgttttaaaagaacgttctatagaagaattagtggaaacaatttataaagtgtataacggtaagaaagaatatagtgcttctcttatgacttcatttttcacagataaaaacccattaacgccaaaagaacaaattgtattaagggaaattggcaatggtttaagtagtaaagaaataagtgaaaaattatttttgacagatggaacagttagaaattatacatctgttagaattgataaattatttgcagataatcgttttgatgcttggaaaaaggcaaatgaaaaaggctggatctaaatacaaacaaaaaagtattgagtgttttgatttaagagactttgaaagtgagtcaataatcaaaatcttactcaatacttttattttggtactcgcaagttagatttgttaactaattttttcgtttattataaaacgaaacaatcaggtaaacgataaagcctacaaagatacccaataaaatagatagtactgccgtcactattaatggtaatttaaaaaatatttgtaggaaaataccaatgataattgcgataattactgcaattaatgtgactgtattttcatttgaaatgttcattcattttcactccttaacaataacattatatcatgctatagctttccaaaatattgaaatatgtagatatggctattgacgatatttcttaacttttatatgattaatcggaatgaaaaaagagaagtaggtggcaaaatgaagtcaaataaatcgcttgctatgattgtggtagccatcattattgtaggtgtattagcatttcaatttatgaatcataagggtccttttaaaaagggaacaaatcatgaaactgtacaagatttaaatggtaaagataaagtacatgttcaaagagttgtggatggtgatacatttattgcaaatcaaaatggtaaagaaattaaagttaggcttataggggttgatacgccagaaacggtgaaaccgaatacgcctgtacaaccatttggcaaagaagcatcaaattatagtaagaagacattaacaaatcaagatgtttatttagaatatgataaagaaaaacaagatcgctatggtagaacattggcgtatgtatggataagtaaagatcgtatgtacaataaggaattagtggaaaagggacttgctagagaaaagtatttttcaccaaatggcaaatatagaaatgtatttatagaagcacaaaataaagctaaacaacagaaattaaatatttggagtaaataattaaataggtgattatatatattaaagtaaaatatacttgaagcatcgatttattattaccataaatttatatatagaaataatttaaaggcataataaccatagtgcgtatcgagcgtaatggattattatgcctttgattttacttgaatatagctgtgatttgattaacctgttctttatttaaagggtgtttagatagctctatggcttcgctaataatacgtcgtaacgaagattttgttgaaactgtatcaacatatttatctctttcttcagagccttgaatgatattaactgtaccatcactaaagtaaataacaccggtactttggactttaaagttaaagttttgttcaatatgatcctttaatgctttagcattatttgctgctaattgatacggatcataatcataaaaatcataaataacacgatttggttgaacagtttctgtaaaagtatagatagactttcttgatgaattaaactgatcatgatattgctgactaatgtaatgaccgacaactttttcaatattactattgctcatttctgtatcatgctcatcaggtacatcaaagtgataaaatgttttttcaccccaactttttacatcaacgtttattaaaccgatatctgaaacaatgataaaatcaaatgaacgtgcatactcgaaaaacggatgtttagtagctaaattgcttgtaacgataatatcgtaatattttaatttaccattttcgagatagctgtctaaaatcttgcgtaattctcttttagcatttttgtatgcatggtggccaacatcattattagaactcagcatttgacttcttaattcagcattttctgcacttaatgctttgttctttttaataagttgctttcttgcataaacttcggtatctattttactattactatacctttgatttaaaactaatataccaattaatgctacaatgataatgataagtacaacataaaaagacattttttcaccaatcctttttgacttctttaactttgtatacaataataattaataaagattaattgttattcaatttcccacatttttattagttgattttagttcatcattgttataatcaaattataaactgacagatattgatgttcaatgaatatgacgtgaaagattcgtgaattcaagtttatgtcgaatttatgttataacggtcatttaaattacagaattaggtcactcatagtattttgaagattgaattcattaattttaaaatgtataatgatatttgtgaaagcgcttgcttaggaggtgtatttgagagtgaatgaaatgaatgctaaagaacaattagtggacaatttaatgaaaacatcatcgcaattatttaaatttcacggtgaagttgccatgcagcttttcttaaatgatgaattaaaattaccttctattgttgaaatatgcgtggaacgtaagcgtttaagtgatattgtgaaagttattccgcaatcatatgcgttactatacatagataagcaagatcaagcaatagctaaagaagatttatcactttcaaaaattgcaaaagtttatgtgcaatatgataatacaacaataatgagtattttcgtttatgatgttgtaaacgatgaatggatttttagattggatccgaatatacgtatacctaagagtaacatttacttccatagtctaaattgggatgtggattatattaaaccagagattgttctaatgtatgatctaatgcaacaccatcagtatcatcattattccaattataaacgcgtcatagatgcattaagctactatcaattttttattttaaaatttgtagtaggtgagcaacgtattaaggatgcaatccagagaacaataaataattaagaaaaagcaattcataacgcagttgaatacatgtgttacgaattgcttttatattagtttttatcacacaagttttttaatgcaaccccgtgatagcaaaactcatatgtagataatacagctttttcagcatcatctacatgaattccaaacatcatcgaaatttccgaagcaccttggttaatcatttttaagttaatttttgattcagctaaggcatgtgtaattttatttgcagtaccaatgactttattcataccttcgccgacaatcattaaaattgctaaatcatgctcaatacttagctcatcaacatcacatttttgacgaatttcatttaatacttttgtttctttattttgaatttgttttgaacgcataacgatactgatagtatcaatacctgaaggcatatgatcaaatgaaatattattatcctctaagacacctaatatctttctagtaaagccgacttgtctattcattaaatactttttgatattaataacagtaaaatctttatcacaacttataccgctaatcacatttttcgcatttatttctctatcatgcactataaatgtacctttatcttgagggcggttcgtatttttaataactacagggatgcgatctttataaagtggttgtaaggcttcatcatggaaaacactaaaaccagcataagataattcacgcatttctcgataagtgatttcttcgattaattcaggatctttgatgatatttggattagctttataaataccagacacatcggtgaaattttcataaattgtagctctaacaccacttgatatgatggcgccagttatatctgatccgccacgtggaaatgtaactatatatccttcatgagatacgccaaaaaatcctgggataattagtttttcatcataatctcttaattttttaatttcagagtaagcactatctaatatttgtgcttcttgtgggacgtcagtaacaaaaatacccgcttccttcggtgatatatattttgttggtataccttgactattattatataaagctatcaattgcgcattaaaatcttcaccacaagaaagtaatgcatctaatagtctcttcggttcattttttaattgattaatataatgttccaaagtcacatctatcgtccgtaaaatactttcatccatttgcaattcttttacaatatcatcataacgctgaataatttctctttttttatcatgataatcaagatgattaatgaccttttcatataatctgattaacaaatcagttgttttaatatcattatcatgtcttttacctggagcagaaacgataacaatctttcgctctggatcagaattaacaatatttaaaacctttttaatttgagtagcattggagacggagctaccaccgaatttggaaactttcatagtgcatgccaacctttctaaaaaatcagaaaattgtattcagttttgtaagtaagaatgatattatgtatttatattttgaatattacgaactttacaaaaataaagaataattctatactatactatcatctagtgtttttcaataatacatttgtttttctcaaaagcacaaacggaggtacataaaatgaaaaaattaaatatagcattattaggattaggtactgtcggatctggtgttgttaaaatcatcgaagagaaccgacagcaaattcaagatacattaaataaagatattgtcataaagcatattcttgttcgagataaatctaaaaagagaccgctaaatattagtcaatatcatttaactgaagatgttaatgaaattttaaatgatgattcattagatattatcgttgaagtcatgggaggaattgaaccaactgtagattggttaagaacagcacttaaaaataaaaaacatgttattaccgcaaataaagatttattagcagtacatcttaaacttttagaagatttagcagaagaaaatggtgtagctttaaagtttgaagcgagtgtagcaggtggtattccgatcgtaaatgccataaataatggtttgaatgcgaataatatttcaaaatttatgggaattttaaatggtacctctaattttattttatcaaaaatgactaaagagcaaacgacatttgaggaagcacttgatgaagcgaaaaggcttggttttgctgaagcggatccaactgatgatgtagaaggggtagatgcagcgcgtaaagttgtcattacatcatatttatcatttaaccaagtcattaaattaaacgacgttaaacgaagaggaattagtggtgtaactttaactgatattaatgtagccgatcaactggggtataaaattaaattgattggtaagggaatatatgaaaatggcaaagttaatgcatcagtagaaccaacgttaattgataaaaagcatcaattagcagctgtagaggatgaatataacgcgatttatgtcattggtgatgccgttggtgacacgatgttttatggaaaaggagcaggcagtttagcaacaggtagtgccgttgtaagtgatttattgaatgtagcattattctttgaatcagatttacacacattgccaccacattttgaattaaagacagataaaacaagggaaatgatggattctgatgcagaaattaatattaaagaaaaatccaatttctttgtagtagtgaatcatgtcaaaggttcaattgaaaattttgaaaatgagttaaaggcaatattaccatttcaccgatcattaagagttgcaaattacgataatcaagcatatgccgctgttatagttggattggaatcatcaccggaagaattaatcactaagcatggatacgaagttgacaaagtatacccagtagaaggagtttaattataatgagaagatggcaaggattagtagaagagtttaaagcacatttaccagtaaatgaaaatacaccaaaattaactttgaatgagggaaatacaccactcattcattgtgaaaatatgtctgaaatactaggtatagatttatatgtgaagtatgaaggtgccaatccgacaggttcatttaaagatcgcggtatggtaatggctgtgacaaaagcaaaagagcaaggtaagaaaattgtaatatgcgcttcgactggaaatacatcagcgtctgcagcagcatatgcagcgagagcaggtttaaaagctatcgtcgtaataccagaaggtaaaattgcattaggtaaattgtcgcaagcagtaatgtatggtgcagaaatcgtttctattgaaggaaactttgatgaagctttagaaattgtaaaagaaattgcaaaaagtggcgaaatcgagcttgtaaactctgtcaatccatttagaatcgaagggcaaaagacaggctcatttgaaattgtacaacaattagacggtgaagcacctgatattttagcgattcctgtaggtaatgcaggtaatattactgcatattggaaaggctttaaagaatatcatgaagctaaaggatcacaattgccgaaaatgtttggcttccaagctgaaggtgcatcaccaattgttcaaaataaagtcattaaaaatcctgaaacgattgcaactgctattcgaattggtaatcctgctagttgggataaagcgactaatgctcttaaagaatcaaatggattaatagatagtgttactgatgatgaaattttagaagcatatcagttaatgacaactaaagaaggtgtctttagtgaaccagcaagtaatgcttctattgcaggtttaattaaattgcacagacaaggtaaattacctcaaggtaaaaaagtagttgcgattttaactggtaatgggttaaaagatccagatactgctatttcactattagataatccgataaagccattgccaaatgataaagatagcattatcgattatattaaaggagctttataacatgtcgaatgttttggagttaacaattcctgcatcaacagccaaccttggagttggctttgattctataggtatggctttagataaatttttgcatctgtctgtaaaagaaacatcagggacaaaatgggaatatattttccatgatgatgcatcgaagcaattacctactgacgaaacaaactttatttatcatgtggcacaacaagttgctgctaaatatagtgttgacttgcctaatttatgtatcgaaatgagaagtgatattccattggcaagagggttaggttcgtcagcttctgctttagtaggagctatatatatcgcaaattattttggtgatatccaactatctaaacacgaggtattacaattagcgactgaaatcgaaggacatcctgataatgttgcgccgaccatttatggtggtttaatcgctggatattataatgatgtcacgaaagaaacgtcagttgcacatatcgacataccagacgtggatgtgattgtaacgataccaacttatgaactaaaaacagaagcatcaagacgtgctttaccacaaaaattaacacatagtgaagccgttaaaagtagtgcaattagtaatacaatgatttgtgcattagcacagcacaattatgaattagcaggtaaactcatgcaacaagatggctttcatgaaccgtatcgtcagcatttaattgctgaatttgatgaagtgaaaacaattgctagtcaacataatgcctatgcaactgtaattagtggtgctggaccaactattttaatatttagtcgcaaagaaaatagtggcgaattagttcgcgctttaaatagaaatgtagttacatgtcattctgaattagtggatattaatgttagtggtgttaaagaacgaattgtataccaatagacactttatattgtaaaatagtattgaatgtgaaatagagaggagatttaatgcgatatgacaaattataaagttgtcgttttagacatggatgacacattgctaaattcagataatgtgatatcagaagaaactgcaaattatttaacagcaattcaagatgaaggttattatgttgttttagcatctggtagacctactgaaggtatgattccaactgctagagatttaaaattacctgaacatcatagctatattattagttataacggcagtaaaacgattaacatgactaatgaagaagtagaagtaagtaaatcgattggtaagcaggatttcgatgaaattgtagattattgtcgagatagaggctttttcgttcttacatatcatgatggtcaaattatttacgacagcgaacatgaatatatgaatattgaagcagaattaactggtttaccgatgaaacgtgttgatgacattaaagcgtatattcaagatgatgttcctaaggtcatgggtgtagattatgtagcgaatattacagaagctagaattgatttgaatggtgtgttcaatgataatgtagatgctacgacaagtaagccattcttcttagaatttatggctaaagatgtttcaaaaggtaatgcaattaaagcgttatgtcacaaattgggatattcggtggatcaagtcattgcttttggtgatagtatgaatgataaatcaatgtttgaagtcgcaggtctagctattgctatggggaatgcatcagatgaacttaagcaatatgcagatgaaattacgttggaccataatgaaaatggtattccacatgcgctcaaaaaattgttataaattttaaaataagcctaagcacaggatatttgaataagatatcttgtgtcaaggctttttatttatgtgaaaatgcgttagctataatatggcgcatttgaaatacatattatagattagtaatgatatctaaagaatagagtagatgcatattttttaagtaaatcaagtattaattagtcacggaaggtagataaataaatttgaatcattctgagtaataacgaatgtattaaaaaatgcagtgacaatctaacattaattgttaaaatcactgcaagcatcttgattttatttagctgtttttgtccagtcatgcttccctctgaagcgttttacatgagcatatatttggtcagcagtataatctaaatttgtataaactgtaatactgaacgctgattggttttcagcaaatgattcttcggaaaataattcctttaagtgcgtaaataaatcattcatttgtttatggtttaaaccgggatattcccttaaagttctctttaataattgtccgttcttttcttctaatgcttgaactacaataacaaatctctcatcttgctttagtacatcatcaaataaatttgtttgtccaatcattgaatttcacccctgaaaagttattgttatctatattatacacgatatgcaaaatatctaaaataaagaatggtaacatggtcataataaaatataaacagaatactagttaatacactttatactagaaaaagatattaaagtatatctactttacaccattaaaaaagcggcaaatgctatagataatctaaagcatctgccgtgtgggaatttatttatttttgattgtcataatcgtgtggttttaaattaattgtttctagctttacaaattttgttttgtgaatgattttatgaataaagtaaatcaacgctagaatgattaaaggtaaaaagtttttaaaagcatttaaccattgatcttttaaaatatattcaactgaaccaccaaatagcaagaataatagcgtagcgatgacaatgattggtcctaatggataaaaaggtgctttatatggtaggaccttattaggatcttgaccttgttttttaatagcttgtcgcaatcgtatttgtgaccaaatgcttgatccccaaacaactataatcattgaaccaataatttcaagtaaattaaaaacggcatttgaattaaagtttgcataaataataacaataacaacgactgcatatgtagttaataatgctcttaatggtaattttgttgtcttgtttaatttacttaaaaatttaggtgcttttttgtctgaacttaaggaatacaacattctgcctgttgtataaacacctgaatttgcagcggataatagtgaagttaaaataaccgcattgattactgatgctgcaaaggctatgcctactctatcgaatacaattgtaaatgggctttgacttattgaactacttgctcttaataatgatggatctgtgtacggaataattgcaccaatgactgcaattgataatacatagaataaaagaatacgccaaaacacttgtttaattgctttaggcatagactttttaggatcatctgattcgccagcagttactgctactacttcagtaccaccaactgagaatccagcgactaataatacgcctaggaaaccagagataccaccaacaaacggtgcttggccttttgtatagttttcaaatccatatgcatgaccacctaagataccgaaaatcattaaaaagccaaaaataacgaatacgatgattgttaacactttaattaatgataaccaaaactcagtttctccaaatgattttacagaaaaaatgtttaataatagtaaaattgtaataaagattaagctccaagtaatggggtggaaaaatttaaatgtgtcccagaaataaagcacatttgacgctactatgacatcaacacttgtaactaatgaccacaatgcccaatacaaccatcccatggtaaagcctagagatgagtcaataaagcgtgttgaataagagctgaatgaacctgatactggataaaatgttgccaactctccaattgatgccattaagaaatatagcatgacaccaataacaagataagcgagtatagcgcctccaggaccagcttgagaaatgatattaccagtagctacaaatagaccagtcccaattgcaccacctatagcaatcatggaaatgtgtcttgagttaagactacggttcattttattatcttccatatttagtctcccatctatttaaatatacccattattgtaagctttttaagtgtactattcaataactatttagcactgtatagcggaaaaattaaaattttctgattttttaatcatcttgagcatgtttaattgtaattctgatggggttaaattataatatgtattaaattataattattataaattgtggagggatgactatgtcacgacaagataaaaagttaactggtgtttttgggcatccagtatcagatcgagaaaatagtatgacagcagggcctaggggacctcttttaatgcaagatatttacttcttagagcaaatgtctcaatttgatagagaagtaatacctgagcgtcgtatgcatgccaaaggttctggtgcatttgggacatttactgtaactaaagatataacaaaatatacgaatgctaaaatattctctgaaataggtaagcaaaccgaaatgtttgcccgtttctctactgtagcaggagaacgtggtgctgctgatgcggagcgtgacattcgaggatttgcgttaaagttctacactgaagaaggaaactgggatttagtagggaataacacaccagtattcttctttagagatccaaagttatttgttagtttaaatcgtgcggtgaaacgagatcctagaacaaatatgagagatgcacaaaataactgggatttctggacggggcttccagaagcattgcaccaagtaacgatcttaatgtcagatagagggattcctaaagatttgcgtcacatgcatgggttcggttcacacacatactctatgtataatgattctggtgaacgtgtttgggttaaattccattttagaacgcaacaaggtattgaaaacttaactgatgaagtagctgctgaaattatagcaacagatcgcgattcatctcaacgcgatttattcgaagccattgaaaaaggtgattatccaaaatggacaatgtatattcaagtaatgactgaggaacaagctaaaaaccataaagataatccatttgatttaacaaaagtatggtatcacgatgagtatcctctaattgaagttggagagtttgaattaaatagaaatccagataattactttatggatgttgaacaagctgcgtttgcaccaactaatattattccaggattagatttttctccagacaaaatgctgcaagggcgtttattctcatatggcgatgcgcaaagatatcgattaggagttaatcattggcagattcctgtaaaccaacctaaaggtgttggtattgaaaatatttgtccttttagtagagatggtcaaatgcgcgtagttgacaataaccaaggtggaggaacacattattatccaaataaccatggtaaatttgattctcaacctgaatataaaaagccaccattcccaactgatggatacggctatgaatataatcaacgtcaagatgatgataattattttgaacaaccaggtaaattgtttagattacaatcagaggacgctaaagaaagaatttttacaaatacagcaaatgcaatggaaggcgtaacggatgatgttaaacgacgtcatattcgtcattgttacaaagctgacccagaatatggtaaaggtgttgcaaaagcattaggtattgatataaattctattgatcttgaaactgaaaatgatgaaacatacgaaaactttgaaaaataaatttgatatgtagtttctatattgcgtagttgagcagtttatgatatcataataaatcgtaaagattcctaacaagagagggtgtttaacatgcgcgtaaacgtaacattagcatgcacagaatgtggcgatcgtaactatatcactactaaaaataaacgtaataatcctgagcgtattgaaatgaaaaaatattgcccaagattaaacaaatatacgttacatcgtgaaactaagtaattcttatcattcaaatacgacgatttgaaaataaagcgggcttacctattatatgggggagctcgcttttttatgaaatttttgtgaagagtgattaatgaattgagtttcatcgatagaacaatatatgtttgtattagttgttactttattaaaatttgagaatattgatagaaggaaatagattactaattttataaagtcactttgttagcgaatgcttgaaagagtaattaatatagtagaatttaaaatttcaatgcgggatttaataagtaagaagtaattgtggatatgttttataaatgttcgacaatacactttgatgttaaatttgatggtttaaaaaatgatttaacaaagaaatgaaactttactgttgaattatgtgaggattgtgttattatataaatcgtaataattacgatttgataaaaagtgaggtaactatatatggctaagaaatctaaaatagcaaaagagagaaaaagagaagagttagtaaataaatattacgaattacgtaaagagttaaaagcaaaaggtgattacgaaacgttaagaaaattaccaagagattcatcacctacacgtttaactagaagatgtaaagtaactggaagacctagaggtgtattacgtaaatttgaaatgtctcgtattgcgtttagagaacatgcgcacaaaggacaaattccaggtgttaaaaaatcaagttggtaaaatcaaatttcgtactttagcccatttacaatatcaataaaacaatgtacagtatatacgaatgctataaactgaatgttttctcatattaataaggaaacattcggtttttaatttgcatttaaaaataattagtttttaaaggggctatttaaagtgaaaatatttgattacgaagatattcaattaatacctaataaatgcatagttgaaagtaggtctgaatgtgatacaactatccaatttggtccgaaaaaattcaagctacctgtagttcctgcaaatatgcaaacagttatgaatgagaaattagcgaaatggtttgctgaaaatgattacttttatatcatgcatcgttttgatgaagaagcaagaataccttttataaaacatatgcaaaattcaggcttatttgcatctatttcagttggtgtaaagaaagcggaatttgattttatagaaaaattagctcaagaaaagttaatccccgaatatattacaattgatattgcgcatggtcactcagattcagtgataaacatgattaaacatattaaaacccatatacctgatagttttgttattgctggtaatgttggtacgccagaaggtgttagagaattagaaaatgctggtgctgatgctaccaaagtcggtataggtcctggtagagtttgtattacaaaaattaaaacaggttttggtactggtggttggcagttagcggcattaaacatatgtagtaaagcagctcgtaaacctttgattgccgatggtggtataagaacgcatggcgatatcgctaagtcaattagatttggtgcatcaatggtcatgattggttcattatttgcggcacacgaagaatcacctggtgaaactgtagaacttgatggtaaacagtataaagaatattttggtagtgcatctgaatttcaaaaaggcgaacataaaaatgttgaaggtaaaaaaatgtttgtagaacataaaggttcgttaacggatacgctaaaagaaatgcaacaagatttacaaagttcaatctcttatgccggtggaaaagacttgaaatcattacgtactgtagattatgttattgttagaaactctattttcaacggtgatagagattaatatttatagtaggtgatgtaaattaaaaaattcatagtaactgttgttgcatttttatcaattattatcattgcgccaataacagaatttaaaccattcattcatttacaaaatgaagtaagacaatatattgatattcacatcaataaagaaacaatttctgcggaaaataaattggatacgccgaagaaacaacaatttgcctttaacaatatacaaatgaacatgtcgaaatcagatgttgagaaaacattaaataaaccaaaaagagtgacatttaatgaatatggtacgaagtggtatacgtattatgatggtgattacaataattttatcatggtaagttacattaaagataaagttaatgcgttatatacaaatcaaaatatcatcacttcaaaatcaaaaattaaatacaatacaccgaaatcggttgtaaggcaaagattaggtgaaccagaaacagagattgttaaaggtagagtgcgttacgaacaaaataataaagaatatgatgttttccataaaaatcacatttatacgacggtattttatgataagcatcgacgtaataatgtaacagctgttttacaagtaagtgatgctatggaaaatagattaaaagaacaatatggagcaccttcgaaatcgcttgcagatagttttgaactacaaaattttgatttagttaatgctgaaagaaaacaacatcaattatctacattgaagtattctaaacagaattctgaaactgctcgtaagcatagtaaagatatggccaaaaatcattattttgatcatacaaatttaaaaggtcaatcaccatttgatcgattgaaaaaagatggtattgcatttaactcagccggagagaatttagcatatggtcaagttagtagtatctatgcacatcaaggattaatgaattctattggtcacagaaaaaatattttaaatgatacgtttaaaatattaggcgttggtgttgattttaatgatgaaaaacaacctttttggacagaaaattatactgattaatgtttttggcatgagattaaagggtaatgtttgtctgtaaggaagtagataaacatgatgacaacagataaaccaaaagatgcggatatacttgaacgcgtcaaagatatacttaataaaaaagaaagaaaaaaataataatggctcgctcttgtaaattattacgggggcgagttttaatttgtgtaacattttgcaggaatctgtaattcaaaatttatattaaagaatgagattatctaacaattcgcaatttctgtttgaactgaatttagattagaataaataaaacctcttgaaaacgtaactttttcaagaggtccaaaatttataaaaatgagggcttaacaattacgataatatataacggtttaaaatattacatttcgcggtacaaaccaattactttcccgattacagcaacattgtcgaggtaaattggctccattgtactattttcaggttgtaatcgataacgatttttttctttatagaagcgtttgacagttgcttcatcttcctcagtcatagcaacaataatgtctccattttctgctatggtttgactgcgaacaattactttgtctccgtctaatataccagcctcaatcatactgtcgcctacgacgtttaatatgaatatgtcgctattgtgtgtcgatgttaagtgttcaggtaatggaaaatattcttcaatattttctactgcggtaataggaacacctgctgtgactttaccaataactggcacatgaatcgtttcttccatattaatattatcatttgtttgatcacttacaatttctatagcacgtggtttcgttggatctcttcttatatagcctttttcttcaagacgtgaaaggtgaccatgaacagttgaactggatgctaagccaactgcttcaccaatttcgcgaacactaggcggataacctttcgtttgaacaacttgtttaatatagttatatatttcgctttgtcgttttgttaattctctcatatataggcactccctaaattaatttaaatacagtatatcattaattcacaaccaaaacaaacgtttgttcgttaaaatattgacacagaacataagttctgataaattactaatacaaacaaatgttctaggagtgaaaatgatgttttacaataaatataaaaacgtatcaacatatatcatcatatttttagtttcaagtgcagcctttgcaatattcttgttaagtgcgaacgttagtgctcactcggaacaagtgtacgaaatgactgaccatcaaattaagaacaatacgataaataaagcatacgaacataaagaccctacaaacaatagcgaacaaagagatgggaaagtgttcgctttaataaattgatacattgtcacaacgttattttgcctatttttgcgaaatagcgttttttattacttttttgctgatcttaaatttgttatattttgttaaagtattataatgattgaataaacaaattgaaggtaggttttttaattgagtaattctgatttgaatatcgaaagaattaacgagttagctaaaaagaaaaaagaagtaggattaactcaagaagaagcaaaggagcaaacagcgttaagaaaagcttatcttgagagttttagaaaagggtttaaacaacaaattgaaaatactaaagtaattgatccagaaggtaatgatgtaacacctgaaaaaattaaagagatacaacaaaaaagagataataaaaattaaaacacaaatctgtaaagaattttctgacattataacttgaaataagtattttacttatctttttattttaaaataagttataatgtatttgataaaattgaagaagggaagatacacaagatgtttaatgaaaaagatcaattagctgttgatacgctacgtgcactaagtatcgacacaatcgaaaaagcgaattctggtcatccaggattacctatgggagctgccccaatggcttacactttgtggacacgtcatctgaattttaatccacaatctaaagattacttcaatagagaccgtttcgtattatctgcagggcatggttcagcactattgtatagcttgttacatgtttctggtagtttagaattagaagaattaaagcaatttagacaatggggttctaaaacaccaggtcatcctgaatacagacatacagatggtgtagaagttactactggaccacttggacaaggttttgctatgtcagttggattggctttagcagaagatcacctagcagggaaatttaataaagaaggatataatgttgtagatcattacacatatgtattagcttctgacggtgatttaatggaaggtatttcgcatgaagcagcttcatttgctggacataataaattaagtaaattagttgttttatacgattcaaatgatatttcattagatggcgaattaaacaaagctttttctgaaaacacaaaagctcgttttgaagcatatggttggaattacttactagttaaagatggtaatgatttagaagaaattgataaagcgattactacagctaaatctcaagaaggaccaacaattattgaagttaaaacaacaatcggatttggttcaccgaataaagcaggaactaatggtgttcatggggcacctttaggtgaagatgaaagaaaattaacattcgaaaattacggtttagatcctgaaaaacgttttaatgtttcagaagaagtatacgaaattttccaaaatactatgttaaaacgtgctaatgaagatgaatctcaatggaattcattattagaaaaatatgcagaaacatatcctgaattagcagaagaatttaaattagcgattagtggtaaattgcctaaaaattataaggatgaattaccacgttttgaatttggtcataatggtgcatctcgtgctgattctggtactgttattcaagcaatcagtaaaactgtcccttcattctttggtggatcagcagaccttgctggttcaaacaaatccaatgtaaatgatgcaacagattatagttctgaaacacctgaaggtaaaaatgtgtggtttggtgtacgtgaatttgctatgggtgctgctgtaaatggtatggctgcacatggaggtttacatccatatggtgcaacattcttcgtatttagtgattatttaaaaccagcgttacgtttatcatcaattatgggattaaatgcaacgttcatcttcacgcatgattcaattgcagtaggtgaagatggtcctactcatgaaccaattgaacaattagctggattaagagccattccaaatatgaatgttatccgtcctgctgatggtaatgaaacaagagtagcatgggaagttgccttagaatctgaatctacacctacttcattagtattgacacgtcaaaacttaccggttttagatgtaccagaagatgtagttgaagaaggcgttcgaaaaggtgcctatacagtttatggctctgaagagacaccagaatttctattattagcttcaggttcagaagttagtcttgcagttgaagctgctaaagatcttgaaaaacaaggtaaatcagtgcgtgttgtttcaatgcctaactggaatgcatttgaacaacaatctgaagaatataaagaatcagttattccatcaagcgtaacaaaacgtgttgcgattgaaatggcttcaccgcttggatggcataaatatgtaggtactgcaggtaaagttattgctattgacggctttggcgcaagtgcacctggcgatttagtagttgaaaaatatggctttacaaaagaaaatatcttaaaccaagttatgagcttataagaataatttataaagcgagtatgtttagaagtctaggatgcataatcttaggcttcttttaaagtgttgaaatttagagtatcgcactcaaactacatcataagtgataagttttgaaaatatactatttcagattaatctttaaaacctctgttataacagcatgatttttgatattatttttagtatcgatattaaaatacttgaataaactagttcttgaaataatgtgatgaatttagtaaaattcagtaggataaagaaagcgggtgaaacaatggcaacttggttagcaattatttttatagtagctgcattaattttaggtttaattggaggtttccttttagctagaaaatatatgatggactacttgaagaaaaacccaccaatcaacgaagaaatgcttcgtatgatgatgatgcaaatgggtcaaaaaccttctcagaagaaaattaatcaaatgatgacgatgatgaataaaaatatggatcaaaatatgaagagtgcgaaaaagtaaattcgcaattgatagaggctattttccagatatggaaatggcctctttttataatcaaattaataaggataaatatgtttattaaaattaaagttaacaaaatgacgaatagactgagaaatgctataattcattttgtatgatttacagagagtttatttaacgagaaggtgtctgcgtgctctatttaatattttcaatcattgtagctttatttatgggaactctagttatagttattcgtatgaaagctcaaaattatccggtaaatgagaaaaaaatagttttgccaccgttttttatggcgactggtgcattgatgtacgtcgttccatattttaggctaacaggatcggaaatgctagaagcctttataattggtttgcttttttctacagttctaatttggacttctcgatttgaagtcaaaggtacagaaatttatatgaaacgatctaaagcatttccagttattttgatttcattacttgtcattcgtactgtgatgaaaatattcattagtaatgaaatagatcctggagaattaggcggcatgttctttttattagcattctgtatgattgttccttggagagtagcaatgctatataaatacaaaaaactaaagaaaacattaatcaattaattacttctaaaaccacttgtgatcgacttctaaatcagtcaatgagtggttttaattttacttgaaaaggtgaaatgattatattaaaataaaagcgaacaaatgttctatatggaggcagtaatgaaaattatacatacagcagactggcacttagggaaaatattaaatggcaaacagcttttagaagatcaagcgtatattttagatatgttcgtagaaaaaatgaaagaagaagaacctgatatcattgtgatagctggagatttatatgacacaacatatccaagtaaagatgcaatcatgttattagaacaagcgattggaaagctgaatttagaactgcgtataccaataattatgattagcggaaatcacgatggtaaagagagattaaactatggggcgagttggtttgaaaataatcagttatttataagaacagattttacatcgattaattcaccaatagagataaatggggttaatttttatacactcccttatgctactgtgagcgaaatgaaacactattttgaagatgacaccattgaaacgcatcaacaaggaattacgcgctgtattgaaacaatagcaccggaaattgatgaaggtgccatcaatattttaattagtcatctgactgttcaaggtggaaagacatctgattctgaaagaccattaactattggaacggttgaatcagttcagaaaggtgtttttgatatatttgattatgtcatgctaggtcacttgcatcatccatttagtatagaagacgacaaaattaaatatagtggctccttattgcagtattcattttcggaagcgggtcaagcaaaagggtatagacgtgtaacaattaatgatggcattattaacgatgtatttattcctcttaagccgcttagacaattggaaattatctcgggcgaatataatgatgttattaatgaaaaagttcatgtgaaaaataaagataattatttacattttaaacttaaaaatatgtctcatattactgatccaatgatgagtttaaaacaaatttatcctaatactttagcgctgacgaatgaaacttttagttacaatgaagaaaataatgctatagaaataagtgaaaaagatgacatgtcaatcatcgaaatgttttataaccatataactgataaagaattatcggatatccaatctaataagataaaaaatattttagaaaacgaattgagaaaggaggattaatgaatgaaaccattacatttaaagttgaataatttcggcccctttttaaaagaagaaattgatttttctaaaattgataataatgaattgtttttaataagtggtaagactggatcgggtaaaacaatgatttttgatgcaatgacttatgccttgtttggtaaagcatcaactgaacaaagagaagaaaatgatttgagaagtcatttcgctgatggtaaacagccgatgtcagtaacgtttgaatttcaattaaataatcgaatttataaagtgcatagacaaggcccttatatcaaagaaggtaatacaacaaaaacgaacgctaaatttgatgtatttgagatggtggatggcaagtatgaaattagagaaagtaaagtaatttcaggtacccaattcattattgaattattaggagtaaatgcagatcaattccgacaattgtttattttgcctcaaggtgaattcaaacgctttttaatatcaaacagtcgtgaaaagcaagggatattaagaacgctgtttgacagtgaaaaatttgaagctatacgagaaatattaaaagaagaagtaaaaaaagaaaatgctcaaatcgagaatagatatcaacaaattgaccttttatggcaagaaattgaatcatttgatgatgacaaaataaaaggcttattagaggttgccactcaacagatagacaaagtgattgaaaatataccacttttacaagctaggtcgaaagaaatactagcatttgtaaatgaaagtaaagaaactgctattaaagactatgaaataatagaaaagaaaacactagaaaataatatattaaaagataatattaatcaactcaacaaaaataaaattgatttcgttcaattgaaagagcaacaacctgaaatagaggaaattgaagctaagttaaagttgttacaagatattacaaacctattgaattatattgaaaatagagaaaaaattgaaactaaaatcgctaatagcaaaaaagatatttctgaaaccaataataaaatattgaatcttgagtgtgataagcgaaacatagacaaagagaaaagaatgttagaagaaaacggagatttaattgaaagtaaaatctcttttattgataaaactagagtattatttaacgatattaataagtatcaacaaagttatctcaatattgaacgcttgagaactgagggtgaacaattagctgatgaattaaataatctaattgaaggtttagaaaaggtcgaagattcaataggtaataacgaaagtgattacgagaaaattatcgaactaaataatgcgataactaacataaataatgaaattaatgtaattaaagaaaatgaaaaagctaaagctgaattagataaactattaggtagtaagcaagagttagagaatcaaattaatgaagaaacatctacattgaagaatctcgaaataaaattagatcgctacgataaatcaaaattggacttaaatgataaagaaagttttataagtgaaattaaatctgctgtaaagattggagatcaatgtccgatatgtggtaatgaaattcaggatttagggcatcatattgattttgacagtatcgctaaacgtcaaaatgaaattaaagaaattgaagcaaatatccacactatgaaatcgaatattgctgtacataattctgaaattaaatttgttaatgaaaaaatatcgaatattaatattaaaacgcaaagtgatttctcactcgaagtattgaataagcgtctgctagaaaatgaaaatgcattgaataatcaaagagagcttaataaatttatagaacaaatgaaagaagaaaaagataatttaacgttgcaaattcataataaacaattgcgtctaaataaaaatgaatctgagttgaaattatgtcgaaatctcatcactgaatttgaaacactctcgaaatataataatatcactaattttgaggtggattataagaagtatgtacaagatgtgaatcaacatcaagaacactcaaaccagattgaagataagttaatacaattatctcaaagaaagttaattgagcaaaataatctaaatcactatgaaaaacaactagaaacttacaataatgacttagaattgaatgaacaatctattgaaatggaaatgtcgaggctgaatttaactgataacaatgatataaatgaaataatagcctggaggggcgagcaagaggaattagagcagaaaagggatacttataaaaaacgttatcatgaatttgaaatggaaatagctaggttagaatcattaaccaaagataaagagttattggactctgataaattaaaagatgaatatgaactaaaaaaaggaaagatgaatacactgatagatgaatactctgctgttcattatcaatgtcaaaataatattaataaaacacaatctatagtttcgcatattaattacttaaatcaagaattaaaggatcaacaagaaatatttcaattggctgagattgtcagtggtaagaataacaaaaatcttacattggaaaacttcgtcttaatttactatttagatcaaattattgctcaagcaaatctgagattagcgacaatgtcagataatcgataccaactaattaggcgagaagcggtttctcatggtcttagtggcctagaaattgatgtatttgatttgcattcaaataagtctagacatattagctcgttatcaggtggagaaactttccaatcgtcgcttgcattagctttagggttaagtgaaattgtacagcagcaatcaggaggtatttcactagaatcaatttttattgatgaaggattcggtacattagatcaagaaacgcttgaaacagcgttagacactttgttaaatcttaaatcaactggtagaatggttgggattatttcacatgtgagcgaattgaaaaatagaatacctttagttttagaagtgaaatcagatcaatatcagagttcaacaagattcaaaagaaattaaaacataaaaaatagagatggtactttggaatgtatagaacaaccttagcccatctctttttatttaaaaattattttttctcacgtaataaatctctgatttcagttaataacacaacattttcttccacaactgcttcttcttcggcttcttctttcttcattaaggtatttgcaatcttaacgaagatgaataaagcaaacgcgatgataataaagtcgataacagattggataaataaaccatatttaataccccagaatgaccattctttagcaaaatcaactgatccgaaaattttaccaattaatggcataatgatattttctactaatgaagatataatcttgttgaaagctgcacccatcacaacagcaattgctaaatctaagacgttaccttttaaggcgaactctttgaattcttttaacattacactcaacctctcttttttaaatgtaacctcaattatacaacaaataaaaaaattagaaaatagattatttaagaaaatttgattatcgcaaagacctttgttatcctataaaggtgcgtgagttattgaataaaatgtttagataatatttttattctactacataaaattaaatatagaattgaagggagtaattaattatgaattcttcttcaccagagaatccaaatggaaagaagtattcaccagtcttcatctatagtgcaattgttgttgctatagtcgtattacttggtgcatttttacctgaacaattcaactatgttaccaataatattaaaatgtggattacagaaaagttaggttggtattatcttattcttactacgattatcgtgttcttctgtatattccttatttttagtcctattggaaaacttaaactaggtaaaccaaatgacaaacctgagtttaatacaatttcatggtttgctatgttgtttagtgctggtatggggataggtttggtgttttatggtgcagctgaaccgatggcgcactttgctacgccacctacggcagatcccaaaactactgaagcttatactgaagccctacgttcaacatttttccattggggattccatgcttgggctgtttatggtgttgttgcgttagcgttggcatattcgcaattccgtaaaggtgaaccaggtttattatctagaactttacgtcctcttttaggtgataaagtagaaggtcctattgggatttttattgacgttttatctgtatttgcgacaatcgttggggtagctgtttcgttaggtatgggtgctctacaaattaatggtggtttacattacttgttcaatgttccaaacaatacgtttgtacaagcgattatcatcattgttgttactatcttatttatagcaagtgcatggtctgggttaagtaaaggtattcaatacttaagtaacttgaacattggtttaggtactattttaatggtagctgctttaattgttggaccaactgttcttattttaaatatgttaactagctctacgggtagtttactaaacacattcttgtttaatagttttgatacagctgctttaaatcctcaaaaacgtgaatggatgtcttcatggacactttattactggggttggtggttaagttggagcccattcgttggtgtgtttattgcacgagtttcaaaaggacgttcaattagagagttcatttctggtgtcttgctagttccagcaattgttagttttgtatggtttagtgtctttggtgtattaggcatcgagacaggtaagaaatacaaagaaatttttgatatgactcctgaaacacagctatttggagtgtttaatcatgtgccatttggcattgttttatcgttgattgcattattattaattgcatcattctttattacatctgctgactcagcaacatttgtattaggaatgcaaacaacatttggttcattaaatccatctagtatggtaaaagttgtttggggaatttcacaggccttaatagcatttgtacttttattagctggtggcggtaacggtgctgaagctttaaatgcgattcaaagtgctgcaattataagtgcattcccattctcctttgtcgtcatactcatgatggtaagtttctacaaggatgcaaaccaggaacgtaaattcctaggtttaacattgactccgaataaacaccgcttacaagaatatatcaagagtcaacaagaagattatgaatctgacattcttgaaaagcgtcagtcacgtagaaatatagaaaaaaaagataactaataaaatttagtcaagtattttaataacaagtagtatgtcattctagtagctagaacagatatactacttgtttatttttgtggaaaattgagtatattcaaaatgataagaacgagaatttcgttattaaactacgaattctcgatttttttatattttaaaataggtttatttatgacaacttaatagtaaggggtttgacaaagctaaagtgatgtacgacggtataaacaaaaattaactaaacatatttcggtatgtgtatatcaaaagaatgacattgaaaagaaattttaaagtttgacgcaataattttctttctgctcaatgaaataatacgtttaaaaattgaattgaatcattcacgaaattgataattattctcaattaataaaaaatacttattacaccttacctgcatgataagttttacttatatactctgattaaaaagtcaaaacctaaattaagcgttttctaagcatgatgagttgtttatcaataaatataataatacaatttaatcaaggcatataaatataaaaatgtatcaagggggatcattaaatggctgcaaattttaaagagcaatcaaaaaaacattttgacttgaatggccaaagttatacttactatgatttaaaagctgtagaagagcaaggtattactaaagtttcgaaattaccttattcaattcgtgttttgttagaatctttacttcgtcaagaagatgattttgtaattacagacgatcatattaaagctttaagtcagtttggaaaagatggaaatgaaggcgaggtaccatttaaaccttctcgtgttattttacaagatttcacaggtgtaccagccgtagttgatttagcttctttacgtaaagcaatggatgacgttgggggagatattactaaaattaatccagaagtaccggtggatttagttattgaccactcagttcaagtggatagctatgcaaacccagaagcacttgaacgtaatatgaaattagaatttgaacgtaactatgaacgttatcagtttttaaattgggcaacgaaagcatttgataattacaatgcagttcctcctgcaactggaatagttcaccaagttaacctagaatatttagcaagtgttgtacatgttcgtgatgtagatggtgaaaaaactgcatttccagatacattagttggtactgattcacatacaacaatgataaatggtattggcgtactaggatggggtgttggtggtattgaagctgaagctggaatgcttggacaaccttcttatttcccaattccagaggttattggtgtacgactagtaaattcattaccacaaggcgcaacagcaactgatttagcgttgagagtaactcaagagctacgtaaaaaaggtgttgttggcaaatttgtagagttctttggtccaggtgtacaacatttaccactagcagaccgtgctacaatcgcaaacatggcacctgagtatggagcaacttgcggattcttcccagttgatgatgaatctcttaaatatatgaagttaactggtagatcagacgaacatatcgcgcttgtaaaagaatatttgaaacaaaaccatatgttctttgatgttgaaaaagaagatcctaattatacagatgttatcgaattggatttatcaacagttgaagcatcgctttcaggaccaaaacgtcctcaagatttaattttcttaagtgatatgaaatcatcatttgaaaattctgtaacagctccagcgggcaaccaaggacacggtttagataaaagtgaatttgataagaaagcagaaattaacttcaaagatggatcaaaagctacaatgaaaacaggtgatattgcaatagcagcaattacatcatgtacaaatacatctaacccttatgtaatgttaggtgcaggtttagttgctaaaaaagcagttgaaaaaggcttgaaagttcctgaatacgttaaaacttctctagcaccaggatcaaaagttgttaccggatatttaagaggtgctggcttacaaccctatttagatgatttaggcttcaacttggttggttatggatgtacaacttgtattggtaattcaggtcctttattaccagaaattgaaaaagcgattgctgatgaggacctattagtgacatctgtattatctggtaaccgtaactttgaaggtcgtatccatcctcttgttaaagccaattacctagcttcaccacagttagttgttgcttatgcattagctggaacggttgatattgatttacaaaatgaacctattggtaaaggtaatgacggtgaagatgtatatttgaaagatatttggccatcaattaaagaagtttcagataccgttgatagtgttgtaacacctgaattatttattgaagaatataataacgtatacaataacaacgaattatggaatgagattgatgtaactgatcaacctctatatgactttgatcctaattcaacatacattcaaaatccatcattcttccaaggattatctaaagaaccgggtacgattgttccgttaaatggtttacgtgttatgggtaaattcggtgattctgtgacaactgaccacatctctccagcaggtgcaattggtaaagatacgccagctggtaaatatttacaagatcaccaagtgcctattcgtgaatttaattcatatggttcaagacgtggtaatcacgaagtaatggttcgaggtacgtttgctaatatacgtattaaaaaccaattagcgccaggtactgaaggtggttttacaacttattggccaacaaatgaagtaatgcctatctttgatgctgcaatgaaatataaagaagatggtacaggtttagttgtattagctggtaacgattatggtatgggttcatctcgtgactgggcagcaaaaggtacaaacttattaggtgttaaaacggttattgcacaaagttatgaacgtatccatcgttcaaatttagttatgatgggtgtattaccattagagtttaaaaaaggtgaatcagctgattctcttggtctagatggtacagaagaaatttctgttaatattgatgaaaatgttcaaccacatgactacgtcaaagttactgctaagaagcaagatggtgatttggtagaatttgacgctatggttcgttttgactcacttgttgaaatggattactatcgccacggtggtattttacaaatggttttaagaaataaattagcgcaataaaaaataggtatcacagtaaattttttatcggtatttgaggcactttgatagtgctctaaaaatagctctataaactttatgatttaataggtcggttcaaaacctttgtgttcttggccggcctcttcttgtattttatgttagaatgagatataaagttaaactgaaagaaggcttaaaatgatatatagtattacagaaatagaagcgcgttatgctgaaactgataagatgggtgtaatttatcacgggaattatgcaacttggtttgaagttgcgcggttggattatatatcgaagttaggttttagttatgctgatatggaaaaacaaggaatcatttcacctgtgactgacctcaatgtcaattataaaaagtctattttttatccagaaaaagttaaagttaaaacttgggttgaaaaatattcgagattacgttcagtgtataaatatgagatttttaatgaaaaaggtgaacttgcaactacaggttccacagaattgatttgcattaaagaagatacttttaagcctatacggttggatcgttatttcccagattggcatgaagcctatagtaaagtgcaagcgctcaataatgaagggaaaatagtagagataatggatggtattgattctttataagttactataaatgtttggagaggcaatattaatatttaatctataaaaaatagtcaatacgttaacattaacataattagcgtgaagataagctaatatatatagcaaaaacgaacttgttcatacaacatcagatgtgctaaaccaaagtacaacttccgaggttcagtacacatcagaatgtgtaaacaagttcgttttattttagttattttttggaataagaaatttcatcttcgtgatcaactacatttacaataatgtggtcatcttcaaagtaccacaaatctttttccgctacgacaacatttaaatcgtcatattgttgttcatagccaatatcaacatcttcctttggttcaactgtaaaagcaggactaaatccttgcttgagttggaattcgccaccatatcttacaaaaaacacgagcactttattattttcaggtaactcaagttcatttttaaaccaagttactgctgcatcagtaagttctatttgcataacaatgacctcctatatttattacagaatgggagtgggcccaaactcgtactgtttgtggaatttcttttcgaaattctctgtgttggagcccaccccaacctgcacattattgtaagctgaatttccataagcttctatgttgggaccgccgaccagaattgaaaaaagctagttataagcgcatttcgttctgtcaactacagctaatataacattgtggaacctatgacattgatttatgtctcggtctcaaatgttcttgtaaaaaaactaagtatagttgaattttaagttaaaaaaattgtttttgcaaaaataaaataatccatcaactgcaaaaaaatatgcaatgatggactaatgtcaaaaaattgttacatccattttattttaggttcttcgcctctaaaaatccttgcgatattagagcgatgtctaattatcaatatgattgaaactaagaaactaacgactaataaaatatagtcttgaatgataagcgagccaatcacacagcaaattgctgcaacgatacttgctaaagaaacatatttaaaaatcttcaatacaataaagaagataattgcaagtattagtaatagtatcgggttgactcccaagacgacacctgcactagttgcaacagctttgccaccttggaattttaaataaactgggtaaacgtgtccaagtatagcgaataagcctacaattaaaccatttgtaaaaaaagtactaatagggccatctgcgtgaactggtaaccataaagggaagaaaacagttatgaaccctttgaaaatatctagaaatgttaccaagaatcctgcaggacgacctaatactctaaagctattagtagcgccagtattaccactaccaaattgtctaatatcttttttgaaaaataattttccaattacgaatccacttgggaaagcgccgataagataacttagtagtaacatgacgattatcatcataaatattacacatcctttaatatcttaggactattttatcatattcgtttaaattacggctaaaatttttaaaaacggggattaatatatggaattaagctatgaaagttaattgacacttgcattttacgctgatttatataagaataactattgtatagttttaaaaacgaacgtacgtttgcaggaggcgaaatcattggcaatgaataaacaaaataattattcagatgattcaatacaggttttagaggggttagaagcagttcgtaaaagacctggtatgtatattggatcaactgataaacggggattacatcatctagtatatgaaattgtcgataactccgtcgatgaagtattgaatggttacggtaacgaaatagatgtaacaattaataaagatggtagtatttctatagaagataatggacgtggtatgccaacaggtatacataaatcaggtaaaccgacagtcgaagttatctttactgttttacatgcaggaggtaaatttggacaaggcggctataaaacttcaggtggtcttcacggcgttggtgcttcagttgtaaatgcattgagtgaatggcttgaagttgaaatccatcgagatggtaatatatatcatcaaagttttaaaaacggtggttcgccatcttctggtttagtgaaaaaaggtaaaactaagaaaacaggtaccaaagtaacatttaaacctgatgacacaatttttaaagcatctacatcatttaattttgatgttttaagtgaacgactacaagagtctgcgttcttattgaaaaatttaaaaataacgcttaatgatttacgcagtggtaaagagcgtcaagagcattaccattatgaagaaggaatcaaagaatttgttagttatgtcaatgaaggaaaagaagttttgcatgacgtggctacattttcaggtgaagcaaatggtatagaggtagacgtagctttccaatataatgatcaatattcagaaagtattttaagttttgtaaataatgtacgtactaaagatggtggtacacatgaagttggttttaaaacagcaatgacacgtgtatttaatgattatgcacgtcgtattaatgaacttaaaacaaaagataaaaacttagacggtaatgatattcgtgaaggtttaacagctgttgtgtctgtacgtattccagaagaattactacaatttgaaggacaaacgaaatctaaattgggtacttctgaagcaagaagtgctgttgattcagtagttgcagacaaattaccattctatttagaagaaaaaggacaattgtctaaatcacttgtaaaaaaagcaattaaagcacaacaagcaagggaagctgcacgtaaagctcgtgaagatgctcgttcaggtaagaaaaacaagcgtaaagacactttgctatctggtaaattaacacctgcacaaagtaaaaatacagataaaaatgaattgtatttagtcgaaggtgattctgcgggaggttcagcaaaacttggacgagaccgcaaattccaagcgatattaccattacgtggtaaggtaattaatacagagaaagcacgtctggaagatatttttaaaaatgaagaaattaatacaattatccacacaatcggggcaggcgttggtactgactttaaaattgaagatagtaactataatcgtgtaattattatgactgatgctgatactgatggtgcgcatattcaagtgctattgttaacattcttcttcaaatatatgaaaccgcttgttcaagcaggtcgtgtatttattgctttacctccactttataaattggaaaaaggtaaaggcaaaacaaagcgagttgaatacgcttggacagacgaagagcttaataaattacaaaaagaacttggtaagggcttcacgttacaacgttacaaaggtttgggtgagatgaaccctgaacaattatgggaaacgacgatgaacccagaaacacgaactttaattcgtgtacaagttgaagatgaagtgcgttcatctaaacgtgtaacaacattaatgggtgacaaagtacaacctagacgtgaatggattgaaaagcatgttgagtttggtatgcaagaggaccaaagtattttagataattctgaagtacaagtgcttgaaaatgatcaatttgatgaggaggaaatctagtgagtgaaataattcaagatttatcacttgaagatgttttaggtgatcgctttggaagatatagtaaatatattattcaagagcgtgcattgccagatgttcgtgatggtttaaaaccagtacaacgtcgtattttatatgcaatgtattcaagtggtaatacacacgataaaaatttccgtaaaagtgcgaaaacagtcggtgatgttattggtcaatatcatccacatggagactcctcagtgtacgaagcaatggtccgtttaagtcaagactggaagttacgacatgtcttaatagaaatgcatggtaataatggtagtatcgataatgatccaccagcggcaatgcgttacactgaagctaagttaagcttactagctgaagagttattacgtgatattaataaagagacagtttccttcatttcaaactatgatgatacgacgctcgaaccaatggtattgccatcaagatttcctaacttactagtgaatggttctacaggtatatctgcaggttacgcgacagatataccaccacataatttagctgaagtgattcaagcaacacttaaatatattgataatccggatattacagtcaatcaattaatgaaatatattaaaggtcctgattttccaactggcggtattattcaaggtattgatggtattaaaaaagcttatgaatcaggtaaaggtagaattatagttcgttctaaagttgaagaagaaactttacgcaatggacgtaaacagttaattattactgaaattccatatgaagtgaacaaaagtagcttagtaaaacgtatcgatgaattacgtgctgacaaaaaagtcgatggtatcgttgaagtacgtgatgaaactgatagaactggtttacgaatagcaattgaattgaaaaaagatgtgaacagtgaatcaatcaaaaattatctttataaaaactctgatttacagatttcatataatttcaacatggtcgctattagtgatggtcgtccaaaattgatgggtattcgtcaaattatagatagttatttaaatcatcaaattgaggttgttgcaaatagaacgaagtttgaattagataatgctgaaaaacgcatgcatatcgttgaaggtttgattaaagcgttgtcaattttagataaagtaatcgaattgattcgtagctctaaaaacaagcgtgacgctaaagaaaaccttatcgaagtatacgagttcacagaagaacaggctgaagcaattgtaatgttacagttatatcgtttaacaaacactgacatagttgcgcttgaaggtgaacataaagaacttgaagcattaatcaaacaattacgtcatattcttgataaccatgatgcattattgaatgtcatcaaagaagaattgaatgaaattaaaaagaaattcaaatctgaacgactgtctttaattgaagcagaaattgaagaaattaaaattgacaaagaagttatggtgcctagtgaagaagttattttaagtatgacacgtcatggatatattaaacgtacttctattcgtagctataatgctagcggtgttgaagatattggtttaaaagatggtgacagtttacttaaacatcaagaagtaaatacgcaagataccgtactagtatttacaaataaaggtcgttatctatttataccggttcataaattagcagatattcgttggaaagaattggggcaacatgtatcacaaatagttcctatcgaagaagatgaagtggttattaatgtctttaatgaaaaggactttaatacagatgcattttatgtttttgcgactcaaaatggcatgattaagaaaagtacagtgcctctatttaaaacaacgcgttttaataaacctttaattgctactaaagttaaagaaaatgatgatttgattagtgttatgcgctttgaaaaagatcaattaattaccatcattacaaataaaggtatgtctttaacttataatacaagtgaactatcagataccggattaagggcagctggtgttaaatcaataaatcttaaagcagaagatttcgttgttatgacagaaggtgtttctgaaaatgatactatattgatggccacacaacgcggctcgttaaaacgtattagttttaaaatcttacaagttgctaaaagagcacaacgtggaataactttattaaaagaattaaagaaaaatccacatcgtatagtagctgcacatgtagtgacaggtgaacatagtcaatatacattatattcaaaatcaaacgaagaacatggtttaattaatgatattcataaatctgaacaatatacaaatggctcattcattgtagataccgatgattttggtgaagtaatagacatgtatattagctaaaaactatatgcaataacgaaattaaatgataaaatacagtaatgttaaattttgactaaattcaagggatttatattaaatgctgaccaagtacttatcgttaaaatagcgatatactttgaccaaactaatataaatctcttgtattgtataagaaatgatgatgtatctctatatttactgaagtttcaattcggtctaattttatagaaggtgcatgattcatgtagaggatgcgaggggtttattttgaaagatttcgatagtttaattcctggatggtttaaagaatttgtccatgttggtaccgatttaatatggtctcaatatttaattggtctattattgacagctggattcttctttacaattagttctaaattcgtccaattacgaatgttacctgaaatgtttagagctttagtagaacgtccagaaactttagaagatggtaagaagggtatttcgccattccaagcatttgcgattagtgctggttcgagagttggtactggtaatattgctggtgttgcgactgcgattgttttaggtggtccaggtgcagtattttggatgtgggttattgcatttataggtgcagcgagtgcatttatagaagcgactttggctcaggtttataaagtacatgataaagatggtggattccgtggtggtccagcttactatattactaaaggtttaaatcaaaaatggctaggtatcgtatttgcgattttaattacaattacatttgcatttgtatttaacacagtgcaatctaatacaattgcggagtcgttaaatacgcaatataatattagtccagtaatcacaggtattattttagcaatcgtaactgctattattatatttggtggtgtacgtagtattgctacgttatcttcgttaattgtaccgattatggctattatttacattggtatggttttagtaatattgctatttaatttagatcaaattgttcctatgataggtacgattattaaaagtgcatttggtatcgaacaagtaactggtggcgctgtaggtgctgcggttcttcaaggtattaaacgtggtttattctctaatgaagctggtatgggttctgcgccgaatgcagcggcaactgctgcagtgccacacccggtcaagcaaggtttaatccaatcattaggtgtgttctttgatacaatgttggtttgtacagcaactgcaatcatgattttattatattcaggactgaaatttggtgataacgcacctcaaggtgttgcagttacccaatcagcacttaatgaacatttaggttctgctggaggtattttcttaacaatagcagttacattattcgccttttcatctgtggtaggtaattactattacggtcaatctaatattgaatttttatcaacaaaccgtgtgatattatttatttttagatgttttgttgtagtacttgtctttgtcggtgcagttgtaaaaacagaaacagtatggaatacagcagacttatttatgggcttaatggcaattgtaaacattatttccattataggactgtccaatgtagcttttgcattgatgaaagattatcaaaagcagaaaaaagaaggcaagaatcctgtttttaaacctgaaaacttagaaattaacttatttggaattagtgcttggggcgctaacaaatataagaactctgataaataaatatttttaatgtaacgattcattttataaaaatcaaataaaccctgaggttttcaaattaatgcgaaaatctcagggttttaaatttgtactcaataattatctgtatcattacactagttaatctaagatttgattaaatattaatatagtaagattgagatttatttccttcattggtgtgcaaagactataccattgataagacatattgttggatagatgaatataattttattttagctttgcacaatttaatagtacgttttagtttgtattgagtattaattcagataatatataaataaatagcattatttgcaaatatgggagtcagatttttttattaaagttattccactttgagaggcatcgaaattaaattaagatatatcatataggataggcgtgtaatagaacacaagtatttaaattattatacttttaagttagacatttccgatatataatcttaataatagaaaaataggtgatgataatgggagaatatattgttactaaaacattgaacaacaatgtcgtagtatgtactaataatgatcaagaagttattttaatcggtaaaggtattggttttaacaaaaaagagggaatgacgttaaacgaccaaactattacaatagagaaaatttataaattagagagtgaacaacaaaaagcacattataaaagtttagttgaaatcgctgatgataatgtattacaagtaattattgattcgttgaattttatttctaatactgcgatgaatgttgattcaaaacaacttgtagtttcattaacggatcatattatatttgcttataaacgcttaaaacaaaatcaagttattagtaatccatttgttatggaaactatgcagttatatagtgatgcatatcatattgctaaacaggtaattgatcagttaaatgcagcattagatgtgcattttcctgaagatgagataggatttattgcattacatattgcatctaacacagaagatttatctatgcatgagatgaccttgatcaataatgttattaaaaaaggtatagatatcattgaatcagaccttgtgacaactgttgataaggaatcattacaataccaacgttttataagacatgtacaatttttaattcgccgattaagaagaaaagaatatatacatgcacaagatgattttgtgtctatgattaaaaatcactatccgatttgctataacacagcatataaaattttaactatgatacaaaaacaatttgatgttaatatcagtgagtctgaaattatatatttaacattacacattcatcattttgaagaaaggattaatcaatcctaaattaagtgtattacacgggcgtttcgttactgtaaagggtatttgtatggtatcattgatgttagtaattttacataagtggactgtttttatacaacatcttatgaatattttaagtggtggtgaatctataattgaatgaaaatgaaaagaatataagaaagaactttttaaaatttaccgaatcacggtatatgaagtttgttggtgggaatgatttagtcttctcattaatagcactagtattgttgggtattgttatttttattttcgaaaaagtatcatacgtttttgatccttttatcatcgtttttaagacgatagcagcacctatcatcgtctctttaattctattctatctatttaacccaatcgtaaatatgatggagcgttatagaataccaagagttgcaggtatttctattatttatctagctgtagtaggtgttattacgttaattgttaatttattgatacctattattggttcgcaagtagatagtttagttaaaaattcaccgcaatatctagaaaaattaattaattctattgataaaatagcaaataatacgtttttctcttcgtattatagtcaaattaatgattggttaaattctttacctaagaaaataccatctatgttaagtgaatttacagatggctttgggtctaaaattgcaacgtttgcagaaacgattgctaatattggcgttgtgattgtcacaacaccatttgtactattctttatgcttaaagatggacatcacttcaaagaattttcaacgaatattatgccaccgaaattccgaaaagattttcatgatctacttgaaaaaatgagtgttcaagttggttcatacattcaaggacaaattatcgtttcattctgtatcggtatactgttgtttatcggttattcggttatcgggttgaaatatagcttagtattagctagtattgctgcagttacaagtgttgtgccatatttagggcctactatagcgatttcaccagctattgtcatagctgctataacatcgccgtggatgctcttaaaattagcagtagtatggactttagtacaatttgttgaagggcacttcatttcaccaaatatcatgggtaaaacacttaagattcatccacttacaatcattttcattttactgtgtgcaggcaaattgcttggtattgtaggcgttattttaggtattccgggatatgctattttaaaagtattagttactcatttattccaattatttaaacgtcgatacaatcgtttctatggtaatgatgtaggtgaatatgatattaaagaaagtaataaaatagttgaataagtaattaaaaataccaatagactatacgtttgttggtatttttatggtgcttataatgttaggtgttcaaatttatgattatcagcacatgtttagcttataaatttttatgaaagtttagccatttataaagcacatgcataatgaagcgagtatttgtgacttgattagtacttcattattatatcgaaaataaaaacaagtggtatttttaatatattaagaagcactcataatcagctgttaattaataatatttttcataagtattgattcatcattttctttatgttaaatatgaatcagtatagataaccatattgttctgtttgagatagaaatattttctatttacttcttaatacagatgtcaatatgacaaaagtgttatataaatcaaaggtaaatgatatgctatttttatggtttatatgatatattttgatttataacagaaataattagaattgatgtgaaaaaatgaatcaggaagttaaaaacaaaatattttcaatcttaaaaattacgtttgctacagctttatttatttttgtagtaatcacgttgtatcgagagttatctgggattaactttaaagatactttggttgaatttagtaaaatcaaccgtatgtcccttgtcttattatttattggtggtggggcatcgcttgttattctctcaatgtatgatgtgattttatctagagctttaaaaatggatatttcattaggaaaagttttaagagtaagttatatcattaatgcattaaatgcgattgtaggctttggtggctttattggtgccggtgtaagagcaatggtttacaaaaactatacgcatgataaaaagaaattggttcactttatttcattaatactgatttcaatgttgacaggtttaagtttgttatcattgttaatcgtattccatgtttttgatgcatcattaattttaaataaaattacgtgggtgagatgggtactttatgctgtgtcgttgttcttaccattatttattatatattcaatggttagaccgcccgataaaaacaatcgttatgtaggcttgtattgtacattagtgtcatgtgtggaatggttagccgctgcagttgtattatacttctgtggtgtcatagttgacgtccatgtctcatttatgtcatttattgcaatattcattattgctgcattatctggattagtcagctttattccaggtggttttggtgccttcgacttagttgttttattaggctttaaaacgttaggtgtacctgaagaaaaagtattattaatgctactactttatcgctttgcgtactatttcgtaccagtgattattgcattaatcctttcatcatttgagtttggtacttcagctaagaaatatattgaaggatctaaatatttcattccggctaaagatgtgacatcgtttttaatgtcgtatcaaaaagatattattgctaaaataccatcattatcattggcaattttagtattctttacaagtatgattttctttgtaaataatttgacgattgtatacgatgctttatatgatggcaatcatttaacgtattatcttttattggcaatacatacaagtgcctgtttattacttttacttaatgttgtaggtatttataaacaaagtagacgtgccattatttatgcaatgatttcgattatcttaattattgtcgcgacgttattcacttatgcgtcatacattttaataacttggttagttattatctttgctttacttattgttgctttccgtagagcacgtaggttaaaacgtccaattcgaatgagaaatctagtcgcaatgcttttgttcagcatatttatactctacatcaaccatatatttatagctggaacattttatgctttagatgtttatacaatcgaaatgcatacgtctgtacttaaatattatttctggattaccattttaattatcgcaattattgttggtgcaattgcgtggttattcgattatcaatttagtaaagtgcgtatatcttctaatattgaagagtgcgaagagattattgatcaatatggtgggaattatttaagtcatttaatttatagtggtgataaacagttctttactaatgaagataaaaatgcatttttaatgtatcgctataaagcaagttcgttagtagttcttggcgatccaatcggtgatgaaaatgcctttgatgaattgttagaagcattctataattacgctgagtatttaggctatgatgttatattctatcaagttacagatcaacacatgcctttatatcataatttcggcaaccaatttttcaaattaggtgaagaagcaattattgatttaacgcaattttcaacttcaggtaaaaaacgccgtggatttagagcgactttaaacaaattcgatgaacttaatatttcattcgaaattattgaaccaccgttttcaactgaatttataaatgaacttcaacatgtcagtgatttgtggttagataatcgtcaggaaatgcatttctctgttggtcaatttaatgaaacatatttatctaaagcgccaattggtgtgatgcgcaatgaaaataatgaagtaattgcattttgtagtttaatgccaacatactttaatgatgccatttcagtcgatttaattagatggttgccagagttagatttaccgttaatggatggattatacttgcacatgttactttggagtaaagaacaaggttatacaaaatttaatatgggtatggcaacgttatcgaacgttggtcaattgcattattcatatttaagagaaagacttgcaggtcgtgtctttgaacatttcaacggtctatatcgtttccaaggattacgtcgttataaatctaaatataatccgaattgggaaccacgctttttagtttatcgtaaagataattcgctttgggaatcactttctaaagtaatgcgtgtaatacgtcacaaataattaaaatccaagtgctaataggtatacagttatgcctgaagcgcttggattttttggtttctataaagaatgatttataaaaaacggcacagataagaatatttaagtttcctatctgtaccgtattttaatatcgaaatgaacttaagttaagtcgcctaacttttattatcagtccaatcagtttcatcaagtgtaaatgttattgtttatttttgtattcttggcgtattttttgttcttctgcataacgctctggatttttcttataaaaatcttggtgatagtcttcggctttgtaaaattgtgacgctggtaatatttttgttgcaattgccttatcagcattaatcgtatttttaagctgctcgatataagtctcagcgagttctttttgatgatcattagtgtagaaaatagctgtttgatattgaggaccacggtcttgatattgaccacctgtatctaatgggtcaatgactgagaaaaatatttctaataacttattgtatgagaataatgcaacatcatattgaatttcaacagtttctaaatgtccactcgtacctgattttacttgttcgtaagtagggttttcaatatgtccgcccatatatccagaagttactttttctatgccgtcaaaggtgtcaaatggtttcgtcatacaccaaaagcaacctccggcaaaataagctgtattaatattcatttttgacatcctttcattagaccttagtacgatttattaagaaatcacttgctttttgaattgtttttatataacgttaatatgtgattattatagtacacaaaaatctatttttgaagatataaggtaggtaaatatggataaagaaactaatgacaacgaatatagacgtcaaagtgaacatcgcacttcggcgcctaagcgaaaaaagaagaagaaaattaggaaattacctatcattcttctgattgttgtaattttacttatcgcattagttgtatatattgtacatagttacaatagcggtgtagaatatgccaagaaacatgcgaaagatgttaaagtacatcaatttaatggaccagtaaaaaatgatggtaaaatttctattcttgtactcggtgcagataaagcacaaggtggacaatcaagaacagattctatcatggttgttcaatatgactttatcaataaaaagatgaaaatgatgtctgtcatgcgtgatatttatgcagatattccagggtatggaaaacacaaaattaattcagcatacgctttaggtggtccagagctacttagaaaaacacttgataaaaatttaggaattaatcctgaatattatgcagtagttgattttactggatttgagaaaatgattgatgaattaatgccagaaggtgtaccaattaatgtcgaaaaagatatgtcgaaaaatattggtgtatctttgaaaaagggtaaccataggttgaatggtaaagaattacttggttatgcaagattccgtcacgaccctgaaggtgacttcggacgcgtgcgacgtcagcaacaagtaatgcaaactttgaaaaaagaaatggttaattttagaacagttgttaaattaccaaaagttgcaggtattttaagaggctatgtgaatacaaacattcctgattcagggatcttccaaacaggtttgagttttggtatccgaggtgaaaaagatgttaagtcattgactgtgccaatcaagaactcatacgaagatgtcaatacaaatactgatggtagtgcattacagattaataaaaacacaaataaacaagctattaaagactttttagatgaagattaaaaataaacaagagcttgggacattaagttcttaggcaatgtaaaaaagctgatttctattaattatttgatagaaatcagcttttttttaaatgtatttgataatatacagctcgtcgagctactattttccttatattaagtgccattaatacaaaacctagctctcgtttaactttatttattcctcgaactgacattcgagtgaaacccaaaatagccttcataaatccaaaaacaggctctacatcaatttttctttgactatagatttttttcgtttctggttcagaaagcttttgattaatttgggctttaaagtattcccaattataattcttcatgattttcttattggatttcgaatttggcttcatgcattgttgcctcaaagaacatgctgaacagtcatcgcattcatatagtttgaagtcacgtttaaaaccatatctatcattacggtatgcatatcttttaaaacctattcttttgttattaggacatataaattcatcattaagttcgtcatatttccagttttgagtgttaaaaatgtcacttttaaactttctcgttttatctttaataaacataccatacgtaataagtggcgttttattaaaatcatctataatagccatatagttttgctcactaccataacctgcatcagctacaatatactccggtaaataaccgaaggtattttgaatcattgttaaaaatggaattaaagttctagtatctgtcgggttttgaaataggtcataggataaaacaaattgagaatttgtcgctatttgtaaattgtatcctggcttaagttggccatttttcatatggtcttccttcattctcataaaagttgcatcatgatcagttttagaaaagctatttctatctttaagaatcgatttttgttcttcatatttactttttctttcggaataatcatcaaatttctttttgaacttcttaatctcagttctttttttacgggtctgttttctaatttgagtacaatcttcgttctgaatagaatgatttaaatcttcgatttctttatctaaatgactaccaattaaatctatttcttctattgttaaatcgctatctccatcttcttttatctctggtattattttttcttcaactaagtcacgatataatgcttttgaattttcgttcaatttcgattcgtgattttgaatacttttcttccacacaaatgtatacctattggcattagcttctacttttgtaccatcaataaaaattgaattatcatcaataagattttgctttaaacattgactatgaaactgaataaataaagattcaattaatgcatcagtattaggatttactctaaaacgattaatagttttataagaaggtgtttgattttgagctaaccacatcattcgaatactgtcatgaagtaatttctctattctacgaccagaaaatacagattgagtgtatgcatataagataatttttaacatcatttttggatgataggatgttgcgccacgatgatgtctgaattcatcgaattcgctatcaggtatcgtttcaacaatttcattaacatatcgtgaaatatcattttgaggaattctaacagaagtttctattggtagtgtaagttgggtcatgttataatttttatacataaggcacctcgttaatttagtttagtggtatttattaaattatacgaaagtgtcttatttttttaaagtatttcaaagtaaaattacatgttaatacgtagtattaatggcgagactcctgagggagcagtgccagtcgaagaccaaggctgagacggcaccctaggaaagcgaagccattcaatacgaagtattgtataaatagagaacagcagtaagataattttcaattagaaaatatcttactgctgtttttttagggatttatgtcccagactcttgttcgttttcaaagaattaattggcatgcatcttatgaagaattattgatctgactttcttacgccagccacaccataatggtttggtttcatttcttctataacaacgtgaattgcttgtctatttgctcccgttgttttttctacggcgtcagtaacttcgctaactaaattttttaattgttcatccgaacgaccttctaataattttacattgacgattggcatcatccaaacctcctaatcattattaatttgagtatatcatgtaatacttaaaaattcatttgtaaaataatagaacatttgttctaaaatggttgaaatagaacaagtgttcgtatataatggaattcaagtaagggaggaataacagtgtataattatcatttattagaagatagggatgttctatgtattgatcaaaaaagtttttttgcgagtgtttcttgtattgaaaaggggctagatccattagaaacaaagttagctgttgttgcagatactaagcgtcagggttctgtagtattggctgcgacacctaaattaaaagaattaggcatcaagacaggatcgcgattgtttgaaataccacatagaaatgatatttacattatcaatccaagtatgcgtaaatatcttaatgtttcagttgctatttctaagattgcattgcgttatattccacctgaagatttacaccaatatagtattgacgaattttttatggatgttactgatagctatcatagatttagttctacagtacatgcattttgcgaaagacttaaacgtgaaatttatgaagaaacaggcatttattgtactgtgggcattggttctaatatgttattaagtaaaattgctatggatgttgaagctaagcataatcaaaatggtatagctgaatggcgatatcaagatgtaccaacaaaattatggccaattcagcccttgagagatttttggggtattaatcgtcgaacagaagccaaattgaataaaagagggatttttactataggagatttagcaaaatatccatataaatttttaaaaaaagagttcggtattttaggtgttgatatgcatctacatgcgaatgggatagatcagagtaaagtacgtgaaaagcataagattagcaatccatcgatatgcaaaagtcaaatattaatgagagattatcattttgacgaagcaaaagtagtaatgcaagagttaattgaagatgttgctagcagagttcgagcaagaaaaaaagtggcaagaacgatacattttgcctttggctatagtgatgaaggtggtgtacataagcaatatactttgaaagatccaacaaacctagaaaaagatatttataaagtagtaatgcatttcgcagataaattatgtaataaacaagcactatatcgtacgctaagtatatctttgagtcaatttattaatgaggatgagcgacagttaagtctgtttgaagatgaataccaacgcaaacgtgacgaatgtctagctaaaacgatagaccaattacatttgaaatacggcaaaggtattgtgtccaaagcagtatcgtttacagaagcaggtacaaaacatggtagattaggtttaatggctggacataagatgtaatgactatacggtttaaggaatatataactgtgattcgtataaaataagtctctaaagataaatatttcatatatcacaatagatttcacaataatatctaagaatacatggaatttatcaaaagagactcaataattattggatataacaatcaaaatcactcaatgcttgcataccgcgttctcgatcggtaggatttttgaaactaatttttaaagcaccgtatatatcttcgcgtacttctaagattcttaagttgcttatagatatattatgtaaacttaggatataagtcactttgcttatcatacctgattcatccggaatatctacatatagatcatacgcagtatttagtccacctagttgtttagcgggcagtgcgtcacgatacgatttagcttcggcaaaaaatgataacaatttttcagaatcattgctttcaattagtctttctaaatcttgaaactgactttttagctgtcgaatcatttctaaaatatacgttttattactcaaggtgatatctttccacatttgtgcattactactagctatacgagtgatatcacgaaaaccaccagctgcaagtttattgactaaatgatgttcttgactgttcttttgactaacatgaactaaactagatgcaacgatatgaggtaaatgacttacgacgcttgttacgtagtcgtgttcttcagcagtagttacaataaatttagcaagagtaggtgataacagttcttttaacgtgtttgctgcttgctcatttcttggctcattgtagactaaaatataataagcgttttcaaataagtgctttttagcatttagtacaccggatttatgactaccagccattggatgaccactgactaaatgaatattatgctttaataaactgcattcgtgttgctgtatcattgctttagtactaccagtatcagaaacaataacaccaggtttagttggcatatgtataagctcgctaagatatttatttgtgatagcaacaggtgttgcataaataattacatcggcttttttaatagcttcactataatttaaacatttttcattaataataccgattgatttagctttatctaactgagaagtatctgcatcgtatgcaataatattagtattagggttatggtattttatattgctagcaagacttccaccaattaatccaagcccaacaaataaaactgttgtcatataaatcaccttatttcgaaattttcagaataataacattgtaaatgagctgttgacacagtgcaatagtaaataaaaatcgataatagcattaatagataaacggatataaatcatctacaataaagagtatagtaacacaatggcaacggaggggtaaatcaatggaaccaatattagaaatgattaaaacattaacaggtattaatagtccttcaggagacacagaagaagcaattcaatttgtcgaaaaatatgcaaaagacttgggttatcaaacaacactaacaaataaaggtgcgttattaataacagtgccaggcaaaaatgatgaagtacaacgctgtattactgctcatgttgatactttaggtgcaatggttaaagaaattaaagaagatgggcgcttagcaatagaattaattggaggattcacgtataacgcgattgagggtgaatattgccaaattaaaactgatgctggtcaaatatatacaggaaccatttgtctgcatgaaacaagtgttcatgtatatagaaataatcatgaaatacctagagaccaaaagcatatggaaataagaattgatgaagtaactacatcagaagaagatacaaagagtttaggtatttcagtaggtgattttgttagctttgatccacgtacagttatcacgtcatcaggttttattaaatctcgtcatttagatgataaagctagcgtagcgatgatactaaaattactaaagaaattaaaagaagagcaaataatattaccacatacaacgcaattttatatttctaataacgaagaaataggttacggtgcaaatgcatcaattgattcgaaaatcaaagaatatattgcattagatatgggcgcgttgggagacggtcaagcatccgatgaatatacagtttctatttgtgccaaagattcttcaggtccatatcataagcaattgaaatcacacctagttaatctttgcaaaataaataatattccatataaagtagacatatatccatattatggttcagatgcttcagcagctttacatgctggtgcggatatcagacatggtttatttggcgctggcattgaatcatctcatgcaatggaacgaacacatattgattctattaaagcgacagagaaattactatatgcatattgcttatcaccaattgagtaaacaattagtgttgacaaatgtgaacgacctatgtaatataatgaactataaaaataattagaattttctaaagaaatagtagcagatatgaaacgtagcaaatagaaagctaatgggtgatgggaattagcacgccatatcttgtgaattggactttggaaaacaattgaatgagttttgaaagtgaacatgaattatgttaactaaggtggcaccacggtaacgcgtccttacaggtatatgcgttatgtggtgtctttttatttagacaaaatgtagtagttagttaaaggtagcaacagaaagttagtgggtgatgtgaactaacaccgagattaatgaaattgggttttgtctgcaacagaaaaattatatatagtaaagagtgaactatgaatatttcgaatattcggttaatttaggtggtaccacgcgtcagcgtcctttatattgataaggatgctgacgtttttttagaaaggagcgtaaagaatggatgtattctataaaaaaataaaagcaaatgtaacacctgaagttttagcacaacttcattccaagaagatcattttggaaagtacaaatcaacaacaaactaagggtcgctattctatagtgatatttgatatctacggtactttaactttagataacgatgtattatcagtaagcactttaaaagagtcgtatcaaatcactgaaagaccgtatcattatttaacgactaaaataaatgaagactaccataatattcaagatgagcaacttaagccaataccgtttatatctggatatgttgggacgtgtagctttgatttagtaagacatgaatttcctaaattgcaatcaatacaattagaggatcacaagcaacacgatgtacggttatatatggttgaacaagtttatgtatttgaccattacaaagatgagttatatatcatcgcgacgaatcaattttcaaattcaacgaaatcagatcttgagaatcgagttaataagtctatcgaagacttaactaaaatccaaccattcatgcctacacaagattttgattttaaaactaaagaaattcaatcaaatatttctgaagaaagatttatcgaaatgattcagtatttcaaagagaaaataacagaaggggatatgttccaagttgtgccatcaagaatttacaaatatgcgcatcatgctaatcagcatttaaatcaacttacgtttcaactgtatcaaaatttaaaacgacaaaacccaagtccatatatgtattatcttaatatcgatcaaccctacattgtcggtagttctcccgaaagtttcgtaagtgtcaaagatcaaattgtaacaactaatcctattgcaggtacgattcaacgtggtgagacgacacaaatagataatgagaatatgaaacaactacttaatgatcctaaagaatgcagtgaacatcgtatgcttgttgatttagggcgtaatgatattcatagagtaagtaaaataggtacctcaaaaattactaaattaatggttattgaaaaatatgaacatgttatgcatatcgtaagtgaagtcacaggtgaaataaatcaaaatttatcgccaatgacagttattgcgaatttattaccaacaggtaccgtttcaggtgcaccaaaattacgtgcaatcgaaagaatttacgaacaatatccacataaacgtggcgtttatagtggtggtgttggatacataaattgtaatcataacttagattttgcattagcaattcgaacgatgatgatagatgagcagtatatcaacgtagaagctggttgtggggttgtatatgattctattcctgaaaaagaactaaatgaaacgaaattgaaagccaaaagtttattggaggtaagcccatgattttagttgtagataattatgattcctttacgtataacctagtggatattgtggcacaacacactgatgtcattattcaataccctgatgatgataatgtgctgaatcaatctgttgatgctgtcattatttcaccaggccctgggcatccattagacgaccaacatttaatgaaaattatctcatcctatcaagataaacccattttaggtatttgcctaggtgctcaagcactgacttgttattacggtggagaagtcattaaaggcgacaaagttatgcacggaaaagttgatacgcttaaggttatatcgcatcatcaacatctgttatatcaagatgtaccagaacaattttctattatgagataccattcattaataagtaatcctgataattttccagaagaattgaaaattactggacgtactgatgattgtatacaatcattcgagcataaagaaagaccgcattatggtattcagtaccatcctgaatcatttgctacagactatggtgtcaaaataattacaaattttattaattacgtgaagaaaggatgaaaaccatgacattactaacaagaatccaaactgaatctatattgcttgaaagtgacattaaggagttaatcgacatacttatttccccaagtatcggaactgatataaaatatgaattactgagttcgtattcggaacgagaaattcaacaacaagaattgacatatattgtacgtagtttaattaatacaatgtacccacatcagccttgttatgagggcggtatgtgtgtgtgtggtacaggtggtgacaagtctaatagcttcaatatatcaactactgtcgcttttgttgtagcaagtgctggcgtaaaagttataaaacatggaaataaaagtgtgacttcaaattcaggtagtacggatttgttaaatcaaatggacattcaaactacgtctgttgatgatacgccaaagcaattagatgaaaaaaacctcgtgtttatcggcgcaacagaatcgtatccaataatgaaatatatgcaaccagttagaaaaatgataggtaagcctacaatattaaaccttgtaggtccattaattaatccctatcacctaacgtatcaaatggtaggtatctttgaccctacaaaactaaaactagttgcaaagacaattaaagatttaggtagacgacgtgcaatcgtattacatggtgcgaatggtatggatgaagcaacgttgtctggtgataatttgatatatgaattgactgaagatggagaaatcaaaaattacacattaaatgcgactgattatggtttgaaatatgcacagaatagtgattttaaaggtggttcgcctgaagaaaacttagcaatcacacttaatatcttgaatggtaaagatcagtcaagtcgccgtgatgttgtcatacttaatgcaggtttaagtctatatgttgcagagaaagtggatagcatcgcagaaggcatagaactcgcaagcactttgatagataatggtgaagctttgaaaaaataccatcaaatgagaggtgaataacatgacaattttagaagaaattgttgaatataaacagttacttttacaaaatggctattatcaagacaaacttaataccttgaaaagtgtgaacattcagaataaaaaatcttttataaatgcaattgagaaagaaccaaagctagcaattattgcagaaattaaatcgaagagtcctacagttaatgacttacctgaacgagatttatcgcaacaaatctcagattatgagcaatatggtgcaaatgctgtatccattttgactgatgaaaagtactttggtggtagttttgaaagattacaagcattgacaacaaaaacaacattacccgtattatgcaaagattttattatagatccgcttcaaattgatgttgccaaacaagctggtgcatctatgattttactgattgttaatatcttatcggataaacaattgaaagatttatataactacgctatatcgcaaaatttagaagtgttagttgaagtacatgatcgtcatgaattagaacgtgcctataaggttaatgctaaattgattggtgtaaataacagggacttaaaacgatttgtcacaaatgtggaacatacaaatactattttagaaaataaaaaaccaaatcattattatatttctgaaagtggaattcacgatgtatctgatgtaagaaaaatcttgcatagtggtatcgatggcttactaataggtgaggcgcttatgcgttgtgacaatctatctgaatttttaccacaactgaaaatgcaaaaggtgaagtcatgatgaaattgaaattttgtggctttacatcaattaaggatgttacagcggccagtcaattacctattgatgcgataggtttcatccattatgaaaaaagtaaaaggcatcaaacaattacccaaataaaaaagttagcgtctgctgttccagatcatattgacaaagtatgtgtcgtggtaaatcctgatttaacaactattgaacacgtattaagcaatacgccaattaacacaatacagttacacggcacagaatctattgattttatacaggaaataaaaaagaagtattcaagcattaaaattactaaagctttagctgcagatgaaaacataatccaaaacataaataaatataaagggttcgtagatttatttattatcgacaccccctcagtgtcgtatggtggtaccggtcaaacatatgactggactattttgaagaacataaaagacataccttacttgatagcaggaggcattaacactgaaaatattcaaacagttaatcaatttaaattatcacatcaaggttttgatcttgcatcaggtatagaagtaaatgggcgaaaagatatagaaaaaatgacagcaattgtaaatattgtgaaaggagatagagaaaatgaataaacaaatacaaacagaagcagatgaattaggtttctttggtgaatacggagggcaatatgttccagaaacattaatgccagcaattattgagttgaaaaaagcttataaagaggcaaaagcagacccagagtttcaaagagaacttgaatactatttatcagagtatgtaggacgcgcgacgccacttacatatgctgcatcgtatactgaaagcttaggtggcgctaagatatatttaaaacgagaggatctaaatcatacaggcgcccataaaattaataatgcgttaggtcaagcgttgctcgctaaaagaatgggcaagaagaagcttgttgctgaaacaggtgcgggtcaacatggtgtagctagtgctacggttgctgcattatttgatatggaacttgttgtctttatgggaagtgaagatattaaaagacaacaacttaatgtatttagaatggaattacttggtgcaaaggttgtggcagttgaagatggtcaagggactttatcggatgcagttaataaagcattgcaatattgggtaagtcatgtagatgatacgcattatttattaggttctgcattgggtccagacccattcccaacgattgttagagattttcagagtgtgattggtaaagaaataaaatcacagatattgaagaaagaaggtcgacttccggatgcaattgtagcatgtatcggtggtggctcaaatgcaatcggtacattttatccatttattaaagatgatgttgctttatacggtgttgaagccgcaggtcaaggcgaggatactgataaacatgcacttgcaattggcaaaggatcacctggcgtattacatggtactaaaatgtatttaattcaagatgaaggtgggcaagtgcaactagcacattctatttcagcaggacttgattatcctggtattgggccagaacattcttattaccacgacattggtagagtaacttttgaaaatgcaagtgatacacaagcaatgaatgctttaatcaactttacaaaacatgaaggtattatacctgcaattgaaagtgcacatgcactgagttatgttgaaagactagcgcctacgatgtcgaaagaagatattattgtagtaacaatttctggacgtggcgataaagatatggaaacaattagacaatatatggcagagcgaggtcttgcaaatgactaaattatttataccttatattatgggcaataaagatttgattgaaaatgcaacattgttgagtgaaaatggtgcagatataattgaaattggtgtacctttctctgatccggttgctgatggtccagttatcatggaagcaggtcaacaagcgattaaacaaggcataacgatagattatattttcgagcaattagaaaaacacggtaatcaaattaagtgtcagtatgtattaatgacgtattataatataatttgtcattatggagaacaagcgttttttgaaaaatgtcgagataccggtgtctacggcttaattattcctgatttaccatttgaattatcgcagcgtttaaaacaacaatttagtcactatggtgtcaaaatcatatcgttagttgcgatgactactgatgacaaacgtataaaagatatcgtatcatatgcggaaggctttatttatactgtgacaatgaatgcgacgacaggacaaaacggtgcgtttcacccagaattaaaacgaaaaattgagtcaattaaagcgatagccaatgtgccagttgtcgcaggatttggtataagatctccacaacatgttgcagatataaaagaggttgcagatggtatcgttattggtagtgaaatagtaaaacgatttaaatctaacacgcgtgaagaaatcattaaatatttacaatctatccagcaaacattgaataattaagtttacttgatttaaaaaaattagtcgaatactgtttgaaaaagtgaaaaacggtgaattataaaattgaatagaaatgatacaaaagtaatatgagcaaacccaaacgttcatattactttttttgaaattgtatgcaaaaatctaaatattactataaaagtatacgcaattaaagcgtttatgttttagttttaacattaactattgtatacttatttagattagatttattatttttgacatttgcagaggggaaatagaaaaactgcaaatacggaaatgaaattaattaacgagagacaaataggagtaatgataatgaagtttacaaatttaacagctaaagagtttggtgcctttacagatagcatgccatacagtcatttcacgcaaactgttggccactatgagttaaagcttgctgaaggttatgaaacacatttagtgggaataaaaaacaataataacgaggttattgcagcttgcttacttactgctgtacctgttatgaaagtgttcaagtatttttattcaaatcgcggtccagtgatcgattatgaaaatcaagaactcgtacactttttctttaatgaattatcaaaatatgttaaaaaacatcgttgtctatacctacatatcgatccatatttaccatatcaatacttgaatcatgatggcgagattacaggtaatgctggtaatgattggttctttgataaaatgagtaacttaggatttgaacatactggattccataaaggatttgatcctgtgctacaaattcgttatcactcagtgttagatttaaaagataaaacagcagatgacatcattaaaaatatggatggacttagaaaaagaaacacgaaaaaagttaaaaagaatggtgttaaagtaagatatttatctgaagaagaactaccaatttttagatcatttatggaagatacgtcagaatcaaaagcttttgctgatcgtgatgacaagttttattacaatcgcttaaaatattacaaagagcgtgtgttagtgcctttagcgtatatcaattttgatgaatatattaaagaactaaatgaagagcgtgatattttaaataaagatttaaataaagcattaaaggatattgaaaaacgtcctgaaaataaaaaagcacataacaagcgagataacttacaacaacaacttgatgcaaatgagcaaaagattgaagaaggtaaacgtcttcaagaagaacatggtaatgaattacctatctctgctggtttcttctttatcaatccatttgaagttgtttattatgctggtggtacatcaaatgcattccgtcattttgccggaagttatgcagtgcaatgggaaatgattaattatgcattaaatcatggcattgaccgttataatttctatggtgttagtggtaaatttacagaagatgctgaagatgctggtgtagttaaattcaaaaaaggttacaatgctgaaattattgaatatgttggtgactttattaaaccaattaataaacctgtttacgcagcatataccgcacttaaaaaagttaaagacagaattttttaggaagggaattatcaaaacatgaaatttacagagttaactgttaccgaatttgacaactttgtacaaaatccatcattggaaagtcattatttccaagtaaaagaaaatatagttacccgtgagaatgatggctttgaagtagttttattaggtattaaagacgacaataacaaagtaattgcagcaagccttttctctaaaattcctactatgggaagttatgtttactattcgaatcgtggtccagtaatggatttttcagatttaggattagttgattattatttaaaagagttagataaatatttacagcaacatcaatgtttatatgttaaattagatccgtattggttatatcatctatatgataaagatatcgtgccatttgaaggtcgcgagaaaaatgatgccttagtaaacttgtttaaatcgcatggttacgagcatcatggctttacaactgagtatgatacatcgagccaagtacgatggatgggcgtattaaaccttgaaggtaaaacacctgaaacattgaaaaagacatttgatagtcaacgtaaacgtaatattaataaagcgataaactatggtgttaaagtaagattccttgaacgtgatgagttcaatctattcctagatttatatcgtgaaactgaagagcgtgctggatttgtatcaaaaacagatgattatttttataactttattgacacatatggagataaagtattagtaccattagcatatattgaccttgatgaatatgtgttaaagttgcaacaggaattgaatgacaaagaaaatcgtcgtgatcaaatgatggcgaaagaaaacaaatcagataaacaaatgaagaaaattgcagaattagataagcaaattgatcatgatcagcatgaattattgaatgcaagtgaattgagcaaaacggacggcccaattctaaaccttgcttctggcgtttattttgcaaatgcatatgaagtgaattatttctctggtggttcatcagaaaaatacaatcaatttatgggaccttacatgatgcattggtttatgattaactattgcttcgataatggttatgatcgttataatttctatggtttatcaggtgattttacggaaaacagtgaagattatggcgtataccgctttaaacgtggatttaatgtacaaatcgaagaattaataggggatttctataaaccaattcataaagtgaaatattggttgttcacaacattggataaattacgtaaaaaattaaagaaatagatgtaaatgatgttagggcttatagttattgatactataggctcttttttatgctttttaataaagcctctaatgatttattaaatgacaagtttaacaagtgattgcaataaatataaatacgaattgcacaatctattttcaaatgattaagttgagtatacgttttaattcattcaatatgactcaaaacaagccaatatgtattatatttttggtgaataaaccttagcataacaatttatatctgattttatatgtgtgtttgcaagtgcgtgatatcaaatgtcatatgtaatttataaaatgcatgagaaatgattgctgtaacaaattctagcaaagtaatcagtttgtatattagaaataaaaatgatgatagatatattatcgatacatagatttaatatgcaccaaaacgtgagtattggtttaatgaaacatagcatgaatgtaaatttagtttactgacataaacacgtcacaaacatacagttatataagtccccttatggaatttcatttctagtttacataatatatattataggaagttatatgtgtctaacgcaaaaggtaccctacatcataatcattatctaatatcgtcacataacttacttatgctataatcatggtattatattgtttggagtgatttgatgaaatttgtctttgatattgacggtacactttgttttgacggccgattaattgaccagactattattgatacattgttacaattacaacatgctggtcatgaacttatatttgcatcagcacgtccgattcgtgatttgttgccagttttaccatcagtatttttatcagcacacattaattggcgcaaatggtgctatgatttcacagcaatcaatgatttctgttatcaaaccaattcatacagatacatatcatcatatcttaaaaataattcaaaagtatgagttagattatattattgatgatgattggaattatgctgcacaacttgacgctgagaacgctatttttgagcgtttagatccacataagctggccagttgtattgatgttgcaaatatcgacacaccgatcaagattattttattaaatatagaaccgacacaaattacaactatattagatgagctcaataaataccatcaagaattggaaatgattcaccattcaaatgaatataacattgatataacagcgcaaaatattaataaatatactgcattacaatatatatttgatgcagatgttaaatatatagcatttggtaatgatcacaatgatattgtcatgttacaacatgctagtaatggctatattataggaccatcagaagcatacacacacgcaatattgaaacttgataaagtcaaacacatcgataataatgcactagctatttgcaaagtcttaaaatcatataaataaaaacacccctatcaaatgataatcattatcaatggataggggctattttaataaaattcgtcctcttcatctaatccaaataattctgccatttctccatgttcaattaacatgtttaaatatgcgtcgcggagttcttcttcactcatatcattaatcatttctttaagagaatcaatccacatatttctgcgtaagtgatagtcttcttcaacttcgtttaacatgattatatgtttatttgctgcttctggactagctgtaaagagtaatgcaatcatatgtttacatatcactcgtcttccatcagcaagaggacaattacatttggattttctaggatgttccatatcaatataacaacgatatactttgttatcactgccctttacttcagcctcatgctgcgtttctgaaaatgattttaagttaattacgcattcactttgataataattaaagcctctttctatagaacgaatacttgcaatatcaagtaatcccatgatgatactcctttttattattatttttagatatagaaaataaaatcgatatgtgtctagattaatatacttgatttatctatattttataacaagtctagaattatcgcattcttaaataactaatatgaaaatgcttgcactaattcttttgtataagggtgtctatcaacattaaataattcctctattgtaaaatcatcgactatcatgccatccttaagaacgataattctattgactaagcgttgtaacacggataaatcatgagaaataacgataaaatgatttaagttcgtaatcgtttgcgcttttaatatatttattacattttgttcagctataacatctaaatttgaagttatctcatcacatattaaaacgcgaggctgtgctaataacgaacgcatgacattaaatctttgtaattgtccgccactcacttcgcttggtaatttagtcaataattgcgcgttcaactcaaaagtagataaatgttgtattaataattggtcctgagcagtattatcagttagacctctgtaataatataacgcttcttttaatgaggtctcaatcgtccaatcagggttaaagctagttaaagggtgctggaaaatcggtaacacagcattgtcacttaagtaaatttctcctttaacaggtttaaataagccaagaaccaatgaagcgagcgtacttttaccacagccactttcgcctaaaataccaacattttctccatcaggtatagtaatattgatatcttgtagcaccatctgctttttattataaccaaaagtcacatgttttaactcaatcatagtaatccctctttaattgtgttctatatttaattagacgttcagtatacggatgcaaatgctcatacttgaaatgattaatattacctcgttcaatgatttgaccttcttttaaaacataaatgtactgacaatatttcaatacatgacttaagttatgtgtgataataaataatgtttgaccatgttctaatacaatatgctgtaataaatccatcacttgattaccgttcaaagcatccaatgatgcaactggttcgtctgcaatgattaatttaggtttcaacatgagaacgcttgctatgtatacgcgttcaagttggcccccagaaagttggaaactatatttatttaatatatctttgctttgtaaattaacccacgacaaagccttgtcaattttggacaaagcctcttctttacaacttttataatgcttacgataaatcgcagttaactgtttacctaatttagtatggtcgttaaaactttctgcataattttgataaatatagccaattgtatgaccataatattgactcaatctactaacattttccccatcaaattggtacgaatcatacgtgcaggttaaatcaaatggtaaatattcaagtaaggctttagcaatcaaactttttccagcgccgctctctccaatcagggcattaatctgttgattataaattttcaaatcaatccctttaataagtgatttctcactagtattctttattgttaaattttgtatatcaatgagactcattatattcacctcgttgtttcagcaatctatctcttagcgcatcaccggttaaattaaaaattaaaatagttatagcaatgactgaagcaggtgcaatcaacataattggatgagacgaaataaaatcacgaccttgttgcaacatagcgccccactctggtgttggcggttgtgcacctaacccaataaatgatagtgaacttatatatagaatgattttaccgaaatcaacgaccatcaaaacgataatagccggtataattttaggtgttaaatgacgtattaatattgttcttataggtacatgaaataattgtgccatttttatataaggcttattcatttcgctattaactatacttctagtcaaccttgtgtaattcatccattttattactgtaattgaaataactaaattccataacgatggttggaaaaagcttgctaaagcaatcatgatgataaattctggaatacttagaccaacatcaataaaccttaacactaatcgttcaatccacccctttttatatccggcaaatagacctagtgtaacacctatgacaacgatagctattaatgttaaaacagtaacaaacaatgttgaacgtgcaccgataataattcgggtaaataaatctctcccataatcatcagttcctaataaatgcaaccaactaataggttcaaaagtttgtgataaattgactttggttgcattttcactactgacaaagaattgtagtacaatcatcacaaatataaatgcgccgaatacaaaaaagataaggttattctttgaaaatattttatgcatgacggtcactactttctgatatcaatggtgtattggttttgtttttcggatttcctaattgtaaacgctgcttcggatcaagtaataacgttaataaatcagcaatcgtattgataataacaacgaagaagccaataaataacacgcatccttgaataacaggataatctcgagatttaatactatccattaatagataaccaataccaggtatatcaaataaattttcaatcactacagtaccacctattagactaccaagtgaaatccctaataatgggataatcggcaaaattgttggttttagtaaatcatgaattaaaatatagcgttcattcataccgcgtaatcttgatgcttgtacgatattacttttcaataatatcaataaattagaacgcactaagcgaatgatgtatgcacacatacctaaagatagcgtgagtacaggtaatataaactgacttagtataacgctatctatattcattaaatttgtgacaataaataataaaataataccgataaagaacgctggtaaactaattgatagagttgagatcactctaatcactttgtcagataacttatgaaatcgtttggctgctataatgccgagcggtatagatatgcataatgacactactaatgttgaaaaagatatgagtagtgttatgggtgcatagttgaataatatctgtgttaccggttcttttgattcaaaactttttcctaaattaaaatgtaataaatgattcatccaatgccaccactgtaccaataaagaatcatttaatcccaatttatctttggttgcatttatttgttccgtcgacacttgtgctacatcaagatgtaatattttatcaacaggattgcctggtgataatttcattaaaatgaatgcaagtgtagaaataacaaataaaacaactatcatttgtatcagtctatacaaaatagactttattatgaacataatagtccccctctttgtgtaaattactaacactttctatttacatgagaatggcgcatgtatatgcaacttacatattaagaactaacgttcattatagtattatccaaaaagaaattgaagtatatttaattttttaacaaaatcattataaaatataatatttagaatcaagtcaaccatgtaaaatataaaaaagtcaaaacaaaaacaactatagcactgtattccaccactttcgaaataattgttactgcagtgtaacttaaaagttgatgattttgtgcatatagttgtcgaatattatttcttatctttacggcgaagttcagcgccctcatagccgtatttttcaatttgcttttctaatttacgcgcttttctttctttacgccaatttcttgtaaaataccataatagaaaactaattaataaactcatgatcgctaaaaacgccgcgtatcctaataatggttgatattttatatcttgaaaatttggaataaaaaatgcaagcacacctaatataacaaatgtaattactgctgatacaaaccatttatttaaaactaagcaacagaatattgttaataaaatcattattaaagttgtgatccataaataattaggcatatcgaataatgtcatattcattctccttttatttcattactttccttgtatacattttattataaatttttaaaaacttaaacaatagcagtcagtttcaagcaatattctatctactattagaaaaatcattgttccttgcgacatgggaatcgtaacattatcgtttaggagacaaaattatgtataatgaatgtattataccaaaggagtgattatatgtctcaaggtttacctttaagagaagatgttcctgtttcagaaacatgggatttaacagacttatttaaagatgatcaacaatattatgaaagtattgacgctctagtacaacaagcaaatcaatttcatcatacatatgcaacaacattaaattcaatcgaacaaattaatactgctttagctgaattagaaaatattttaattgccttagatcgcttaagtaattatgcagaactacgtttaagtgtagatactagtaatattgaggcacaagtattgagcgctaaattatctactacatacggtaaaattgttagccaattatcatttgtagagtcagaaatacttgaattaccagaagaaatacttcaacaattagaaaaatcatgtccatatcaacactatattaaacagttaataaaacaaaagccattccaattatctgcgtcggtagaacaattattagcaattttatcacctacgctaaacagtccttacgatttatacggcacgacaaaaatgctagatattacattcgattcatttgaacatgatggtacaacgtaccctgtcgactatgctacgtttgaaaatgattatgaagataataaagatcctgagtttagacgtaaaagtttcaaatcgtttagcgatgggattcgaaaatatcagcatactaccgcggctacatataatatgcaagtacaacaagaaaaaattgaagctgatttacgtgggtttgaatcggtcatcgattatttattacatagtcaagaagtaacgcgtgatatgtttgaccgtcaaatcgatatgattatgcgtgacttggcaccagttatgcagaaatatgctaaacttttacaacgtattcacggattagataacatgcgttttgaagacttaaaaatttctgtagaccctgattatgaaccagagatttcaattgaagactcaaaaaattatattttcggtgcgttaagtgttttaggtgatgactatacaaacatgttacgtgaagcatacgatcagcgatggattgattttgcacaaaataaaggtaaagatacaggcgcattttgtgcaagtccatactttacacattcatatgtgtttatttcttggactggtaaaatggctgaagcatttgtcttagcacatgaattaggtcatgcaggtcattttacattagctcaaaaacatcaaccatatcttgaatcagaagcatcaatgtactttgttgaagccccttctacattgaatgaaatgttgatggccaattatttatttaacaaaagtgataatccaagatttaagcgttgggttattggctcaattttatctagaacatattatcataatatggttacccacttattagaagctgcttatcaacgtgaagtgtatcgcaaagtagatcaaggtgaatctttaaatgcgccgacattaaatgaaataatgctaaatgtttataaacaatttttcggagatgcagtagacatgactgagggtgctgaattaacatggatgcgtcaacctcattactatatgggattatattcgtatacgtattctgctggcttaacaatcgggactgtcgtttctcaaaagattaaaaatgaaggccaaccagctgttgatgcttggttagaaacattgaaaaaaggtggtagtgtatcacctgtcgaacttgcaaacattgcgggtgtagacattactacagaacagccacttaaatctacaattcaatatatttctgatttagtggatgaagttgaaaaattaacagatgaaattgagcaagcaaataactaggatgcgagacaacttatagtagaacaatataaaccaagattttcacattactaattgtgagaatcttggtttttttgagggtttatgaataatagaaatatatatttatcgtaagggattttatagtaataactttaagttattgttcgtaatgtgtacctgttaaataaaaataaacactttcagcgatgttaataatatgatcaccaatacgttctagatgtcttgctgctaaatgggcttgtgcagcgacaaatggatcgttatcaataagatacgttgcgttaataatatgactatataagtcatcgatatcttcatcacgctcaattatttctcttattaatacggtatctttctttttaaatgcttgatctaaatcctttaacattaacatagctagtttacccattgtctttaaacgggttaacacataatcatctgtaatcttcgtacgcaatcgaatattggcaatactcgatgcattatctcctattctttctaaatcggaggcgatttttaatgaagaaatcatcatacgcaaatcactcgcaatgggctgttgctttgtaattaacatgataactcgctcattaatattataatttaattgattgatatgtttatcgtttttaactgtttgtcgtgcaaagcctctatcgtcaatacttaatgattttataccattttcaatactcacatagacatttgcacctaaccgacgtaattcttttattaaatcatcaagttgctcctgatatcgttgtctaattattgccattatatatcaaccaaaccttcctgaaatataatcttctgttttcttgtttgatgggttagagaaaattttatcagtgtcatcatattcattgacataaccatttaagaaaaatgcagttttatctgatacacgagctgcttgttgcatattatgtgtaaccataataattgtgtacttttcttttagttcttgaaccaactcttctactcttaatgttgagattggatctaatgctgatgtgggttcatccattaaaatgacttcaggttcaattgctaaacaacgcgcgatacaaacacgctgttgttgcccaccggataaactatatgcatttgtgtgcaacctatcctttaattcatcccaaattgcagcgccacgtaatgatttctcaacgatttcatcaagaacttttttatttttaataccgtgaatctttggcccgtaagtaatattatcgtatattgattttggaaatggattaggttgttggaagaccatgcccacatttgtacgtaattgttctttagaatatttttgatcaaaaatgtcttgatcgcgatatagtattttaccagctgttttgactgtgggtactaactcaaccattcgattcaaagttttaatatatgttgatttgccacaaccagatggacctataatggcagtaatttggttttcataaatatctaaattaatattttgcaatgcatgattttcgccataccataagtctaaattttgtgttgaatatataacagaatgtgagtttgtatcatctggtgttttatgatgactttgtgagacatcaaacgtatgactttgagatatttgtttagtttgtgcaagtgtttgcgccatatttaatactccctttttaatagataaattagattgattgtttaaattagaattttttactatatttgttacgtaaaataatcgcaacgccattcattaagattaagataactagtaaaacgataatgcctgccgatgcaacattctggaattcttcttgtggcattttcgcccaagtaaatatttggataggtaatgctgaaaattgatccaatatacttctaggtgttgccaataatatagttggtataccgataagcacaagtggcgctgtttctcccagtgctcttgaaagagacaaaatgaatccagttaaaataccaggtaacgctgctggtaagacaacacgtcttatcgtttgccatttattagcacctaagccgtaagaagcttcgcgtactgagttaggtacagctctaattgcttcctgacttgaaacaataataattggtaatatcagtaaggtcattgttagcgctgctgccaatatactgttacccattttcaaggcttcaatcccggcaccaccaacgaacaaagtgtaacctaataacccaaatacaactgatggtacaccagctaaattggaaatactgattttaacaaactgagtaaatttgttgtttttcgcatattcttctaagtatatagctgtacctattcctaggatgattgataatggaatgatacttaacattaaccaaagtgaaccgattaatgcgcctttaacgccagccatagatggtgttgaagaagaaaaattagtgaaaaactgtaaatttaaatgacttacccctttaatcaatgtttgagttaacaacgcaataagtacgacaagtcctaataatgtacatgctaaaaatatgagtttgaacactttatttttaaccgttctggatgataaatgtttttggacaagttgttgatcgacgagtgattgtctattattatctgtcgtttccatattaatactcctccctaaaacgcttagaaatccattgagaaagtaaattcatgattaaggtaaagataaataatgtgaatcctacagcataaatactgtaataaatatttgatccaaatgttgcatcacctgtcgctatctcaacaatatatccagtcattgtttgaattgaacttgttaaacttaatgaagctgttggtgaactacctgccgctaatgatacaatcatcgtttctccaattgctcttgaaatcgcgagaactattgaagctacaatacctgatgttgctgcaggaagtacgaccttagttgctacttctaatttagttgctccaagtccataggcaccttctcgaattttatttggtacagatgccattgcatcctcactcaaacttgtgatgagagggacaatcataatacctacaactaagccgggacttatagcattaaactctccaagaccaggtatgaaagatcttaatactggtgtaacaaaggttaatgcaaagaaaccaaacacaattgttggtattcctgctaaaatttctaatatcggttttattatgcgtcgtgcacggtcacttgcatattcacttaaataaattgctgcaccaagcccgactggaactgcaaatatagtcgcaataactgtgatttttaaagtccctattatcaatgcccagataccaaacttagggtctgagccggtaggattccaagtagtagaaaatagaaattcagttattggaattctggtgaaaaaagtgatggtttctaaaagcaatgtgattaatatacctagtgttgttaaaatggaaatcgctgaaattgcagctaaaataactggtataattttgtcattatgcttcccttttttattattatttttttcaattaaagctttaacattagtagatgaagtcataatcaaacctctttctattactcccaaaataattagatttgtaaaataatgatgaaccactattttaagttgataagcttgtagactaactgaatgtcaaaatcagcgtctcgataaatcaagctttgcactctaaataatgattcaccatcaaaatcatgtttcaagacacatttgaaattgcgtcttattatttcttgtcttcagactttttatcatcagatttcttgtcgtctgatttttgatttttatcaataaatgcttttaaatcatctaattgtgatttgtatgttttctctggtgctgctacatatccaccttcttcagctgctttacctttatcttctaagacgaatttgataaattctgacattactttattatctttcaatgctttttcatttacataaatgaataatggtctacttaatgcataagagttatcttgaattgtttttttcgtaggctctgttgctttaccattttcatctttgattttaacttcttttaatttatctttattttgtacgtagaagttatatccaaagtatccgattccctctttgtttttcgttacagaagaaacgatagcatttgtatcagcatttttttctgctttaatatcttctttattcattacttcattttcaaagaagtcataagtaccatgacttgagtttggtgatacagcatttatttttttatctggccatttactattaacatctttccatgttttagcttttccagaataaattgcttttaattgctgtttgtctaattcatctacaaaatcattttctttatttacagcaaccgttacaccatcttgcgcaattttgaattctttgtatttgatattcttatcttgtaatttttgcttctcttcatctttaattggtctagaagcatcagcgaagtcgatatctcctgcaatgaatttttggaaaccagcacctgtaccagcttgtcctgctgagattttagcatccgagtgatcttgagcccatttttcatttaatttctccacaattggtgctactgttgatgagccatcccctttagcttccccttttaaatcactattaccactgccaccattaccgccaccacaagcacctaataatagtgttgcacctaaagctgtagtaccaacaaattgccattttttcattgaaatatcctccctgtatgaacaacaaatagtatttgtattgattacatctttatcttaacctcgaattattaacctcatctttagaaactgtaaatgttacataaatgtttgttaagaaaatgtaaatattattttttgttaatctgaaaaatattgcttcatcagtaaaattgaaatgtttcctgataaattttccaaatttaaatatgaacacaaaaaatggacagatgaaattaaaaatctacttcatctgtccgatttaatattgaataaaaaaacacgcatcctacgatacgtgtaaaaatgattattcttttgactcaattcgactccaaccttttttagttaaagtgattttaccagtttctatattaatgatcttctgtttatataagtgaccgattgcacgtttgaatgaacctttactcatattgaatacttctttaatcgcttcagggcttgatttgtcccagaatggtaattcaccatcatattcaactagtaaatcaaagatgacttgaccgtcatcgtctaaacgttcatgtgcaagtggtaaaaatgaaccatttaactcacctttatcattatgaccgataattctaacttgaacagattcacctagtctcggttcagctttacgttctgattcatgtacaaaaattttgtaacctgattcgcttaataagaagctaccaattcgtaatacgcggtatggtttggcttcaatgacttcgttttttaaattatcgtcgtgtacaggtgtaaacatattttctacaacagattcactcgctaaacgtccatacatatgattctcacggtcaattcgtaatgtaactagcaaatgatctccaggttgtggccatagtgatttcacttttggtaaatcttcccatggtactaacacttcacggggtaatccaacatctatacgtgccccatcgcgatccgttttaagtactttagcaaaatcatatttatctttcgtaatatcaggcatattttgagttgcaaataattcacctgaacggtttggataaatgaagaaactatattcttcacctacttctaattcatcatcatcgttcatttctgattggtttaactttacgttttcaccgtttggtccttttaaaaggtaagttgagccttgtaaccctactacttcaaggaattctatagaacctactatatctttgtctaatgccatgttattctccttcgattcttgtattctttattattataacatgtgtgagtcattctatcattacaacttatatgaggtcgaaactgtgacgataatatgatataattcttccgttagaatatcgaatgaaaaaaaggagaaaatgcatgttacaagtaactgatgtgagtttacgttttggagatcgtaaactatttgaagatgtgaatattaaatttacagaaggtaattgttatggattaattggtgcgaatggtgcaggtaaatcaacattcttaaaaatattatctggtgaattagattctcaaacaggacatgtttcattaggtaaaaatgaacgtctagctgttttaaaacaggaccactatgcttatgaagatgaacgcgtgcttgatgttgtaattaaaggtcacgaacgtctttatgaggttatgaaagaaaaagatgaaatctatatgaagccagatttcagtgatgaagatggtatccgtgctgctgaacttgaaggtgaatttgcagaaatgaatggttggaatgctgaagctgatgcagctaaccttttatccggtttaggtatcgatccaactttacacgataaaaaaatggctgaattagaaaacaaccaaaaaattaaagtattattagcgcaaagtttattcggtgaaccagacgtactattactggatgagcctactaacggtctcgatattccagcaatcagttggttagaagatttcttaattaactttgataatactgttatcgtagtatcacatgaccgtcatttcttaaataatgtatgtactcatatcgctgatttagactttggtaaaattaaagtttatgttggtaactatgatttttggtatcaatctagtcagttagctcaaaagatggctcaagaacaaaacaagaaaaaagaagaaaaaatgaaagagttacaggactttattgctcgtttctcagctaacgcttctaaatctaaacaagcaacaagtcgtaaaaaacaacttgagaaaattgaattagatgatattcaaccatcatcaagaagatatcctttcgttaaattcacgcctgagcgtgagattggtaacgacttattaatcgttcaaaatctttctaaaacaattgacggcgaaaaagtattagataatgtatccttcacaatgaatccaaatgataaagcgattttaattggagatagtgaaattgcaaaaacaacattacttaaaatattagctggcgaaatggaaccagacgaaggttcatttaaatggggtgttactacatcgttaagttacttccctaaagataactcagagttctttgagggtgtaaatatgaatctcgttgattggttaagacaatatgctcctgaagatgaacaaacagaaacatttttacgtggtttcttaggtcgtatgttatttagtggtgaagaagttaagaaaaaagctagtgtgctttcaggtggagaaaaagtacgttgtatgctaagtaaaatgatgttatcaagtgcgaatgtacttttacttgacgaacctactaaccacttagacttagaaagtattactgctgtcaatgatggccttaaatcatttaaaggttctatcatctttacttcttatgactttgaatttatcaacacgattgcaaaccgtgttatcgatttaaataaacaaggcggcgtttcaaaagaaattccatatgaagaatacttgcaagaaatcggcgttttaaaataaatataatttgtagaatttcttttcgaaaatctctgtgttgaggcccggccaacttgcacatttttgtaagttgacattactgtcaccttctatattgggacttattccccaactcgtattgtttgtagaaattaggaatccaatttctctatgtgagacgctgacaagtattgaaaaaagctaggtacaaagtcattttcattcagtcaactactgtcaatataacattgcagggcctagggcattgattcatgtccgagactatattcaatttaatagacattaactggacgtctcgatgctaatatttatagcatcgaggtgtcttttttattttttagcacatcagcacagtgaacaccccttctctaaattacaaatacagttatcaacgcattaaaagagtacatttatttaatgtgcatattgagtacgctataagtatttcggattttatttttcaaaaaagtttcattctcaccaccttttataatataagcaacgctataacttgaattttcaggttattccaaaaaatctaaattatcggtttacattcatatttgtcatatgtataatgaacacataccaatttaataatattttgatgaggcgcatcaatcatgagtaaagtttagattactgtctgctaacagctaaatttgaaagggtgcgatgccgaagcgattataatagcagttataatttgttggactttttggttaagagctgagagtttgtcattatttaaaaataatggagtgcatcacttgtatatagattaagagcaagttcgcattccgaacttgttctttttttattattgtgtgcccttcctaacaattaggaggattatatggtaacaagaagcgtgttgaaatttggcggatcatccgtcagtgattttacaaaaataaaaaggatcgctgaaatgttaaaggagcgggtcaatcaagatgaacaattaattgtcgttgtaagtgctatgggtaacacaacagatcaattaatgacgaatgtatcgacattgactaaaacaccaaaacaacaagaactggcattattattgacaaccggagagcaacaaactgtatcttatttatcaatggtattaaatgatatcggtgtgaatgcaaaagcaatgactggctatcaagcgggtattaaaaccattggccatcatttaaaaagtaaaattgctcaaattaatcctcaaacatttgaacaagcctttcaagaaaacgatattttagtagttgctggatttcaaggcatcaatgaccatcaggaattaacaactttaggcagaggtggttctgatacgaccgctgtggcacttgctgttagtaatcaaataccttgtgaaatttataccgacgttgatggtgtgtatgccactgacccaagacttttaccaaaagctaaacgactagacatcgtctcatatgaagaaatgatggaaatgagcgctttaggtgctggtgtacttgaaacaagaagtgttgaattagctaaaaactataatatccctttatatttaggaaaaactttatcgaacgtgaaaggaacatggattatgtcaaatgaagaaatattagagagaaaagcagttactggtgtggctttggataaacatatgatgcatgtaacaattagttatcccctacctgacaatcagctacttacccaactatttacggaacttgaagaaggtgctgtaaatgttgatatgatttcacaaatcgtcaacttggatggactacaactatccttcacgattaaagatagtgattttcatcaaatttctatgattcttaaaacattaaagaatcaatatgaagcattagcttataaaatcaatgagcattatgtcaaaatttcattaattggctcaggcatgcgtgatatgtcaggtgtggcatcaaaagcatttttgacattaattgaaaataatatacctttctaccaaacaacaacatctgaaataagtatttcatacgtcattgatgattttaatgggcaacaagcggtggaaaaactatatgacgcatttaacatttaatggtaaaatgattgttaaaatattctaaaaattggaaattattataaaatggagtgacaagttatgacaaaattagcagttgtgggtgcaacaggattagtaggtacaaaaatgttggagacattaaatcgtaaaaatattcctttcgatgaattagtattattttcatcagcacgttctgcagggaaagaagttgaatttcaaggaaaaacatatacagttcaagaattaactgatgctcgtgcaagtgaacatttcgattatgtattaatgagtgctggtggcggtacaagcgaacactttgccccactctttgaaaaaggtggtgcaatcgttatagacaattcaagtcaatggcgtatggcagaagatattgatttaatcgttccggaagtcaatgaacctacttttacaagaggtatcattgccaatccaaactgctctacgattcagtctgttgtgccattaaaagtattgcaagatgcttatggtttaaaacgagtggcatatacaacatatcaagctgtatcaggttcagggatgaaaggtaagaaagatttagctgaaggtgtaaatggtaaagcaccagaagcatatccacatccaatttataataatgtgttaccgcatattgatgtgtttttagaaaacggatatacaaaagaagaacaaaaaatgattgatgagacgagaaaaattttaaatgcgccagacttaaaagtaacagcaacatgtgcacgtgttcctgttcaagatagtcatagtgttgaaattgatgtaacacttgaaaaagaagcgactgcagaagatattaaagcattatttgatcaagatgatcgcgttgttttagtagacaatccagagaacaatgaatatccaatggcaatcaattctactaataaagatgaagtatttgttggccgtatacgtagagatgattcattagaaaatactttccatgtatggtgtacatcagacaatttattaaaaggtgctgcattaaatgctgtacaagtattggaacaagttatgcgtttaaaaggagcgaattaaaatgacacatttatttgagggtgttggcgttgcacttacaaccccttttacaaataacaaagttaatcttgaagctttgaaagcacacgttaattttttactagaaaataatgcccaagcaatcatcgttaatggaactactgctgagagccctactttaacaacagatgaaaaagaactcattctaaaaacagttattgatcttgtagataaacgtgttcctgtcatagctggaactggaactaatgatactgaaaagtcaatccaagcttcaatccaagctaaagccttaggggctgatgcaattatgttaattacaccctactacaacaaaacgaatcaacgtggtttagtaaaacattttgaagcgattgcagatgctgtgaaattaccagtcgtgctgtacaatgttccttcaagaacgaacatgacaattgaaccagaaactgtagaaatattaagtcaacatccttatatagttgctttaaaagatgctacgaatgattttgagtatttagaagaagtgaaaaagcgaattgatacaaattcatttgcattatatagtggcaatgatgacaacgtcgtcgaatactatcaacgtggcggtcaaggggttatctctgttattgccaatgtcattcctaaagaatttcaagcgttatacgatgctcaacaaagtggattagatattcaagatcaatttaaaccaatcggcacactgttatcagccctatcagttgatattaacccaattcctattaaagctttaacaagttatttaggatttggaaactatgaattacgtttaccattggttagcctagaagatacagatactaaagtgcttcgtgaagcatatgacacatttaaagcgggtgaaaatgagtgaaaatattactaattggctatggtgcaatgaatcagcgcgttgctagattagcagaagaaaaaggacatgaaatcgttggggtcattgaaaatacaccgaaagcaacaacgccatatcaacaataccaacatattgctgatgttaaagatgccgatgttgcaatagatttttcaaatccaaatctgcttttccctttattagatgaagcgtttcatttgccattagtcgtggcaacaactggcgagaaagaaaaactacttaataagttagatgaattgagtaaaaatatgcctgtgtttttcagcgcgaacatgagttatggcgttcatgcactgactaaaattttagcagctgctgttcccctacttgatgatttcgacatcgaattgactgaggcacatcataataaaaaagtagatgcaccaagcggtacgttagaaaaattatatgacgtgattgtatctttgaaagaaaatgtaactcctgtttatgatagacatgaattaaatgaaaaacgccagccacaagatattggtattcattctattcgtggaggtacgattgtcggtgaacatgaagttctatttgccggcactgatgaaacgattcaaatcacgcatcgtgcacaatcaaaagatatttttgcgaatggtgcaatacaagcagcagaacgcttagttaataaaccaaacggcttttatacgtttgacaacctataaacatattaaaggagatcgattattttatggtacaacatttaacagctgaagaaattattcaatatataagtgatgctaaaaaatctacaccaattaaagtatatttaaatggcaattttgaaggcatcacatatccagaaagttttaaagtatttggttcagaacaatctaaagtaatcttttgtgaagcagatgattggaaacctttttacgaagcatatggtagtcaattcgaagatatagaaattgaaatggatcgtcgcaattctgccattccattaaaagacttaacaaatactaatgcacgtattgaaccaggtgcatttattagagaacaagctattattgaagatggtgctgtcgttatgatgggtgcaacaattaatattggcgcagtcgttggcgaaggtacgatgattgatatgaatgctactctcggtggtcgtgctacaactggtaaaaatgtacatgtaggggctggcgcagtattagcaggtgtgattgaaccccctagtgcttcaccagttataatcgaggatgatgtattaatcggcgcaaatgcagttattttagaaggtgtacgtgttggtaaaggtgctattgttgcagctggcgcgattgtgactcaagatgtaccagctggtgcagttgttgctggtacacctgcgaaagtgattaagcaagcttctgaagtacaagatactaaaaaagagattgtagcagcattaagaaaactgaatgactagtgacgtcaacgtataataatttcaaggttgagatacgattatgtctcaaccttattgtttatcattaaataaacttatgatcacaaatttcgaaatacgttacactatttatatagtaatttaacacaaaggattgataattatgaatgaattagaatttgttacgaaacatcgccgtcatttacatcaacatcctgaattaagcttacatgaatttgaaacaactgcttatattaaagcgtttttagatagtttaaatattaaatacgattgcccattggaaactggcgtcattgcatacttagaaggtaatggctcacatacgatagcgtatagagctgatattgatgcattacctattttagaggaaaatgatgtaccttatcgcagtcaatctgatcatgtgatgcatgcttgtggacatgatggtcatacaactgcattaatgctttttgtacaacgttgcaaagacatgcaagatgcggggcaattaccgcaaaatgtcgttttcattttccaacctgcagaagaaactggtggcggtgcaaatcgattaataaaagccggtgcctttgataagtatccaattgaagcggtatttggtattcatgttaacccatttgctgatgaaggcattgcagtgataagagatgaagaaattacggccagcgcaacagagtatcgctttttcttaacaggcctgtcaagtcatgttgctgataaagaacaaggtcattcttgtggtgaagcattacaacatgtattaactcaaatatcacaaattcaacaatttcaccttaacggtttaaaacgaaatattgttcatattggtcattttaaagctggtgaagcgattaacactgtaccaagtaatggttatttagaaggtacaattcgtacatatgatattgatgatttaacaatcgttaaaaatcaaatgcacaagatagcagaaagtgtcaagcttctgtttaatgtagactgtgaagttaaatttgcagaaggttatccccctacaatcaatagtccgaaattacgtactcaaatagaggacgccttaataaaagctgatttaaatgtctatgacaaaccaacgccattcttatttggggaagattttagtttttatggtcaacaactagctccagcttactttgtttttataggaacacgaaatgaagataaaggttttgtaactggtttgcacacatcatatttaaattttgatgaaaaagtgttaataaacgtggttaatttttacgaaaatttattaaataattacaaagaggtgtaatacattgacagcaacatggtctgtaaataagaaaatatttttacaaaatgcaatcacagtcaaaaacaatcagccattaatggcagttgttaaaaataatgcatatcactatgacctagaatttgctgtaactcagtttatccatgcaggtatagatacatttagcacaacatcactacgagaagcaattcaaattagacaacttgctccagatgcaacaatctttttaatgaatgcagtttacgagtttgatttagtccgtgaacatcaaatacacatgactttgccgtcgttgacatattactataaccataaaaatgatttagcaggtattcatgttcacttagaatttgaaaatttattacatcggtctggatttaaagatttaaacgaaattaaagaagtattgaaagatcaccatcataatcaaaatgcaaaaatgattattagtggtttatggacccattttggatatgctgatgaattcgatgtgtcagattataatgttgaacgttcacaatggatggaaattgttgaagcacttttatctgaaggttatcagttcgacctaatccatgctcaaaatagtgcgagtttttatcgggaaggacaaatattactaccccaccatacacatgcgcgtgtaggtattgcgttatacggttcaagaccatatagttcactgaatcaacatgaaatagttcagtcattgactgtaaaagcacatgttattcaagtgcgcgaagtacaagctggtgattattgcggttatagctttgcctttgaagtgactaaaaacaatacaaaattagctgtagttgatatcggttatggcgatggaattttacgaactcgtgctaaacatgaagcacttatcaatggtaaacgctacccgatacgtgcattaatgatgagccatatgtttgttgaagtagatggcaatgtacatgcacaagatgaagttattctttataataatgatatccgcatcgatgaatatacctttaaaggtgttggtgcaaattctgaacaattaagtgctatgaatcatgattctttaaaaaaggagtacatttcaaatgactgttaaatataatcaaaatggcgaattaacaatggatggtattagtttaaaaacgattgcgcaaagctttggtacacctaccattgtttatgatgaactacaaattagagaacagatgcgccgttaccatcgcgcatttaaagatagtggattaaaatacaatatttcatacgcctctaaagcatttacttgtcttcaaatggtcaaactggtggctgaggaagatttacagttagatgttgtttctgaaggtgaattatatacggcattagaagcgggatttgaaccaagtcgcatccatttccatggtaacaataaaacgaaacatgaaattaggtatgctttagaaaataacatcggttattttgttatagattcattagaagaaattgaattaatagaccgctatgctaatgatacggttcaagttgtattacgagttaatccaggtgttgaagcacatacacacgaatttattcaaactggtcaagaagatagtaagtttggattatcaattcaatatggcttagctataaaagcaattaacaaagtgcaacaatctaagtatcttaaattaaaaggtgtacattgtcatattggttcacagattgaaggtacagaagcatttattgaaactgctaaaattgttttacgttggcttaaagagcaagacattcaagttgaattattaaaccttggtggtggctttggtattaaatatgttgaaggtgatgaaagtttccctatcgaaagtggtattaaagatattacagacgcaataaaatccgaaattaaagttctaggtatagatgcaccagaaataggtattgaaccaggacgatctattgtaggtgaagctggcgttactttatatgaagttggaaccattaaagaaattccagagataaataaatatgtttcaatcgatggcggtatgagtgatcatatcagaactgcactttatgacgcaaagtatcaagcattgcttgttaatagaaatgaagaagcagatgacagtgtaactatagctggaaaattatgtgagtctggtgatatcattattaaagacgctaaattaccttcatcagtcaaacgtggagactatcttgctatattatcaactggtgcatatcattactctatggcatccaattacaatcaaatgcaaaagccttctgtgttttttttaaaagatggcaaagcacgtgaagttattaagcgacaatcgttaagacaacttattattaatgatacaaaataaaaataaataaagtaatccccgaagaacagaaaattatactgtgactcggggaatttttaagcattatagatggctgtagataacatgcttggacatatactctaaaaaaggaagaacagcacttttttagttagaaagtgtttattttttgtcgttaatcctttaatttagttagctctattcaactaatttaaagcatcatatacataccacactttaaacaagcatcatgaaattaggttttattctttaattgctttttcaaataatataaaacgataaggattaataacaaataaagtgtaaaaaataaaatttcatcaaaaccaaaatctttacttgttattaatacatcaatatgttctaattccatcatctctgttttgatataattattaaactttggcaaagtcattaaatgtacattgtaaatataataataaaagtctatgaatatgatgttaaaaaatatgtatgttttatcaatattagttttgaaaaatacaatcccagaaatcattatcggaatcactaatacaatcatcattgccgctaaaatattaatatttaaaccaattgcagataatacaccgaaaactaataaattagcaactaaactaaggataagatatttcataaaatcacctcgtcgttgtacaccataattatattatataaatatatttttctattgcaaacaatgttggtgatataaaaaaagagttctcaatttggttgagaaactcatcgcgttaagtatttgtaataagcatataaaaacaccttacttcttggtaaggtgttagttaaaatcaatgattcaaatctaagaattatagtttaacaacgtttgcagcttgtggaccgcggtcgccttcaactacttcaaactcaacagcttgaccttcttctaatgatttgtaaccatcttggttaattgctgaaaaatgtacgaatacgtcattttctccttcaacttcgataaagccgaatcctttttcagcgttaaaccatttaactgtaccttgtttcataatctgaaacctccaagactaaaattcattcaatatgcttattcgcatattacaaaaaatacatgcaaatttcactcaaatattctttgcaatatggaataatcatctgcttaacttgtattatagtgcagttattaccaaattgcaatacaataataaaaaatattcatttaatcaattattggtagtttataatatacttcattattttgtaaaacaatgaaactataaaatatttgtaaatcctcttcacaatcttcgcaatagttcatgtcacaattattataaaatgcataaatattatatttgcctgtgacatagttatcgaactgaactttacattgattaatcaattgttgatagtgcttaaacatgtcatcaaaatcttgatattgatatttttcaacaatgttttctggccagtcactgaataaccaccatccctcataatcggctctaattttggtaactgtccacattattaaagaccccttccatacttcaaaactctatacttatttttatacctttatcctctgaaaatcaagtttgacgacttgaaacaaacaaagtattaactatagtaattattagtttttttaagtaaaactacgtataataacattatgaggtggtaaaaatgagacatatacatttacaagtattcggacgcgttcaaggcgtcggatttagatattttacacaacgcattgcaatgaactataacattgtcggtactgttcaaaatgtagatgactatgtagagatatatgcacaaggggatgacgcagatatagagagatttattcaaggtgtaattgaaggtgcctcaccagcatcaaatgtaacgagccatcaacttgaagagttagaactaaatcaaaaattatcggattttcgatcaatataaaatgctaaataaaggaagatgacagtgagatataatatttctcatatatttggggtgttagtgggaattcctgtagcgtttttaacaagcatatttgggataattgcacttgatgtatcttttttaattgatatgtctattggtattgttggctttttaatgacatacctaccgatacaaaaactcacttcacgcaaatatttaaacgaaattggtttgactagaaaagactatcgctatattcgaaatcagttaaatcatacacaccaaaaacttagaggtattttaaaaacgtatgtcaatataagatcaattaaagattttaggcaaattaatgatatataccaaatttcacgttctatttatacgacagttagacagagacctgcatcattttataaagttgagggctttttttattctcatattgataatgctttaaatttggttgatgcatatacacgtctagcaaaaatgcccaaaaaatcaattaatgaacagcaaaaattagaacaaacacgaattactttggatgaggtcaaacgaacattaatcgctgatttaaagcgtctcaacgaagatgattatgaacgtttagatattgaaatggaattaaataagttacatcaaaagcatcatcaagattgatgtaaaatagcaactattggagagatgattgatgactgaaaataaaagtttcaaagaaagccatccactagatgattttataagcgataaagaattatcgaatactactattcaaaaagaaaagttaacaattgaacaacaaaaacaggtagacacaatcagtaaacaaattaaccctttagacaatgaaggtttattagcgtttggttctgatttacagaaacaaatgtctcaattttcacatcaaatgttggatgaggtacaaagtaaagatgttggtcctattggagatactttgtcagatctaatgtcaaaactaaagtcagttaatccaaatgagttaaatactgataaaccatctatgttaaaaagaatttttagcagagcaaagtcgtctatcaatgaaatcttttcaagaatgcaatcagttagtgctcaagtcgatcgcataacgattcaactgcagaaacatcaaacacatttaacaagagatattgaattattagatacgctatatgataaaaacaaacaatactttgatgacttatcattgcatatcattgctgcacagcaaaaaaagttgcaattagaaaatgaaaagctaccacaattgcaacagcaagcgcagcaatccactaatcaaatggatattcaacaagttgcagatatgcagcaatttatagatagactagataaacgcatatatgacttacagctttcaagacaaatagcgttgcaaactgcgccacaaattcgtatgattcaaaatgttaatcaagcccttgccgagaagatacaaagttcaattttgacaagtattccactatggaaaaatcaaatggccattgcgcttacattaatgagacagcgtaatgcagttgctgcacaacgagctgtcactgatacaactaatgatttattaacagcaaatgctgaaatgttgaaacaaaatgcgattgaaactgcaacagaaaatgagcgtggcattgttgaccttgatacattgaaacgtacacagcgtaacattattgagacaattgaagaaacattaattattcaacaacacggtcgcgaagaacgacaattagctgaaaaagaattacaacaattagaacaagatttaaagtcacatttagtgaacatcaaaggaccgaataaacaatcataaattacgaattagatataacaaaaaaggaagcatcctacgattaaattggagatgcttccttttttcgttattcctgttgatatttaattggatcttgttttacaaatatgccgactagatagcctaatatcgttgcaataattgctactgggaaccactctaaagaatacgctcttagaggcaatgattctataaagttaattttcagccaacctaacttactaataacactgaaaatcgacaatataaatacgataataactggaatttgttgtgtaatgcgttttgtcggtatgaatttggcaattaaaattaataatacaacagttattgctactgggtatacaatgcttaataccggaattgacattgagataacagcatttaaaccttggttagcaataataaaactcattaaaatgaaaactaatacaaatgctttgtatgatactttaggtacgattctatggaaatattcagaaactgcaacaataagcccacatgctgtagttagacatgccagcgccacaatgatgcccaataaatactttccgaatgaaccaaatcctgttgaagccattgtcgttaataaatatgtcccaatgttacggtcatgtgatttcaattcatttagtttcatgtcacttactggcatatgattaccaatataacctaatgaaatatatatgaaaattaaagcaattgctgcaattaaaccagcagtcaaagtttgtttgaatatttgatttgttttagtaatacctgttagttttactgcattaacaacaatcattgaaaaagcaattgctgcaatggcatccattgttaaatagccttgtgtaaagccttcagcaaaacttgaaaaattagaatgatatagtgcttcattgccctttccagcactattaccgctaaagtctaagtatcctttaataatcatcgctaaaatagtaatcaataataatggtgttaataatgaaccaatacgatcgattaacttagatggatttaaacaaatatacaaaacgactatgaagtagataatcgtaaatataaataaagcgatactactattactatgtataattggtgtaattgtcatttcaaaagatgtagatgcagttctaggtattgcgaaaagtggtcctatagttaaataaatgatgattaagaacaatattgaaaatttaggtgaaattttatttaatgcgccaatatatccttctttatcaagtgcacctacaatcacacctaataatggtaaaccaatcccagttagaacaaacgctaaaatggcgggccagaaaaattgaccactatccaatccgagattaggaggaaaaattagattgcctgcgccaaaaaacatagcgaagagcgtaaacccaatgacccatgtatttttattcatagagttactcctttttttaaaacacgaaataatttacaagttaatattttagcacaaaaaataatcaagagtctatatggaatatgttgtacatagcagaaacaaaacacatgtgttgtttaaatcaaattatgccagaaaataaaattcttcaaatttactttttaaatagtaactgatgacttttattcacaatttcatataaactcatattttaaacttatttataaagatttaagtagtaatttttttaataatggagagagatgtccaggtaaatgcgcaacaccttcaacgaaaatggcatattgaccataaatattatgaattgtttgttcaacatcttcagttattggatcttgactcaaaaatacattaaatacttcaatgccaaatttacgtgacatttctacagcttcatacgtatcaataataccatcttgactataattaaatgcagacggttcgccgtcagaaaatacgattaaaaatcgttgatgttgatttcgacgcattaatcgttcacttgcaactctaatagcaacaccatcacgattatcatcttgaggttcaagtgccataatacgtgggccatctttttcaaaggttgagtaatcatagttaataatttcattaatgatatttggttgtacatgatcgtctgaatcaaaggcatcctcactgaatgataaaatttcatgtttaatgttcaatgcttttaacgtctcgtggaataacactacacctttcttcgtttcagccattttatcatgcatacttgctgacgcatcaattaacaatgtaaacgtcgcatcaaatgatttacttaaatcttgttttttgtaaaacaatttatactgatcgtcgataaaccaattaattaaatccttttgtaatcgcccttttgttaaattaaaacgtgcatctcgttgttctcgttcaatcgttttctttataatttgaattaagtctttgatttcatattgtacgtcttgtttcgattcttgatattctaaaacatattgtggctcaatttcaggaatttgccattttatttctacatttttgttcacaccatcaagttgaaatgcttggctttgaccaacagcatcgccttcttcacgatttagcgtatcgtttgatcctttgccctttttggtcatcatatcagtcatatcgtctgtagcatcgccttcacgtgcttcatcattacctaatgtttcactattttgtccttcgtgaagctccatttctaaataggcgccaccttttgactcactatctgcagatttagagtcagctttttcactttcgttatcatcatcttctgaagtatcatcttgcccatcgacttgacttgcatcagttctctttaaatcttcaaactctggactagctaatgtattatatagtgttttaggtaagtaataatattcgtttagcatatcttcttttaaaatatcatctacttgatacataattctttgagccagatacatattatcttcagaattttgattttggaaaaaattaggtaaatataagaacatattaactaaaatatcatctaaatctgaatgtatagatggtatatcaaagaaatcttgacttaaaaatgcatgttctaaatacaaaaataataaatctgtatattgtgttttagtacgatacactttaatttgagattccgtatatgatatccgtgtatctaagcgaagatcaattaatttagcagtacttgggcgctcaactttaatagaatttaatacgcgcatatcttctaataatttaaaaagttgttgataaaatttagggtgtttaaaagttttatcttgtactacttcatttacaatttgtacatccatcatatgataaccgtaagcagctaacataacatctgtttttaaaccagccatttcgatatggcttggtcgatgtgaccaaaaccaactcgtaatcaaaacattttgaacaggattatagtaagggaatttttggattttaacttgtgtttgttcattttttaataagagtcgagctaagtcttgcaacatcattacttgcttggcatctaactgttcgtcgttaaattttatgaaacgatcactcatgttttatccctctttaaaagtttagttctacagcattatatattgcttgttgttcacgttcatcttccaatttatcaataattgtacgtttaattgcacgttcaactggcattacagtgattaaatcacacaagtctaataatgcacgtatactagcggcttcttcagaaatttgtccctgcttagacatagtacgtaaatcttcgttaaacttaataatttgttcgatttgtttatcatcttgtaataaactttgctctttaattacattttttaaaatgtccccgtcaatatagtcaacgtgaataacaacaaagcgattttttagtgcttcattcattggcaatgtaccaacataaccttcatttatcgctgcaataacgttaaatcctggtacagctttgattacttcaccagtgtatggattcgtaatttgacgacgataatctaagaccccatttaatacaggtaatgtttcaggtttagccatatttatttcatcaatatataaaatatgcccctctttcatagctttaataactggaccatctacaaagacaatttcttgttgtccttccgcatttgttttaattgttttaaagcctaataagctttctgtatctaaatcaacagaacagttgacttgatgcatgggtgtatcaacaacttcacttaatgtttctgccaacttcgttttccctgaacctgttggacctttaagtaaaatatttttatttaaatcgaataatgccttcgcatcattgaaaactgttgaatctgaattcttataatgttttagtgccattttaaaacgttctcctttaaataaattaaaaaactaagacatggaataagttctccaaatgccttagtttactattctattctgatataaaacgcaatgcttagtatgcgaattgtttatattttaccaaatttactaattgaaaatctcatattaggattcatttcaataattatgcgtttaaacttctttgaaatatgttttatagtaaccgccaactaatcctgaattatctattatttgataatattcttcagtttcgttgataacatcatattgtttgcctacagttaacatgtcagaaactgtaaatttctttgcatctgtattaatgacttctactttcttgattggcgtacgttctttccaagtttcatgtaacataaattttgtcctcactatcgtaaaaatttatttttgtaaagtgaatataaacgataatccactgttttcagtaattctaattgattcaatatcatcttgctcaagtgtttgatatggtatttccacttcatctaagcgcgatttcgcttgattaaagaaatctacatctttcgtttcaaactcaacttgatcgactgcgccatatgccggcattgtcatttcggtttctacaggcattaaatgtatttcgccacctagaccacccgttccaattttgaatacttggacatgatagtcagcattgtcgaagggttggtattctgcaaatacttcaagtccgaatatatttgttaaaatttgacctgtaatatctacatgattcactttaagaatcactggccctaaaccttgcacttgatgtaacggattgaccgcactttcgaaagaaggcatacctaaaccaacgccataattattctcgtttgaatatattgagaaaatatgaccattgttatcttcgagactgaaatatttattgccatttaattctttaactgttgtaaatggaatatccttactcgataatatttccgcatactcctctagacctgagtcagttggtgtacgtaatccaatacccacaaagtgagattcttctaattgctcacttggaacttgtataaattgaagtcttgttcctgggcttatatctgcatcgccgaaacgaattgagttttcaagaagttcttcacaatttaatcctaatatgtcaaccatgaaatgttttgtctgttctatatttgttgtacctaatgttatacttctaagtccacacattatagccacctctatctttatctttactattatattataacttattttaatcataaattatagaatatcggtcagttgattttgattatagattaatatgtgaaaaatgtatttctttaaaagaactatttcatttaaatagctaacataatattgttatggttgctattgagtatgtcattaatgagtatctgtatatagcgattggatattgggatatttcgtttttctgtagtacatgaaaaacatatatatgtcgtgtccataaagtgaatgtacatcttgttcagatgattttaaattaactaaaggcgcttatagaattcataaatttcatcgcttgttattatctaaaatgatttcattagcatattgaaacacgctattctagctatatttctatcgtgagtctatttcatatagaaatgatatattttttaagtagtcaaaattaaactcacattttaatacgaagcattgtaaaaataaagtacagcagtaagatatttcgactagaaaataaacttactgctgtttgttattgatttgatcccgtttttaggaatagtaaactattttgtgttgtggattaagattctaataataagtcttctgggttttcaattaattctttaattgtttttaagaatccaactgcttctttaccgtcaataattctatgatcatagcttaatgcaatatacatcattggacgattttcgattgtatcttgatcaatcgcaattggtcttgtaataattgaatgcatgcctaagattgcagcttgattaccattgataattggcgtactcatcattgatccaaaaataccgccatttgtaatcgtaaatgaaccattaaccatatcatctaagccaagttttttctctcgtgctttaacagctaaattagcaatttctgcttcgatttctgcaaaattctttttatcacaatctcttacgaatggtactaatagtccatcatctgtcgaaacagctacaccaatatcataatattgtttcgtaatcatgtcgtcgccgtcgatttctgcattaacttctggatactttttcaaagctgctacagaagctttagtaaagaatgacataaatcctaatttagtaccatcatgatctttcataaattgttctttcttacgtttacgcaattccataacatttgtcatgtcaacttcgttaaatgttgttagcatagctgtattattagatacctctaataattttttagcagctgttttctttctgcgtgacattttttcacgaatcactggttttgtaggatattgattgtattttttctcttcttttgcaggtgcttgttgtgttgtttgtgttgatgcaggtgcctgttgtttcttatcaatatcttctttacgaacaacatcatttgttttcggacttacttcagcaagattcacaccattttcacgagcatatcgacgcgcagaaggtgtagcattaacacgctgctgattgtcatcatttgtttgattgacttcagctttatctgccgatttatttgttgtttcttcttttttattatttgttgtttcatcattttgttgtggagtattgtcgttactattttctttagaagcattgccactaccttcgccgatgacagcaattgcttgtccaacttctacagtgtcgccttcacttgcaagttgttcagataatacacctgcttcttcagatacaacttcgacattaactttatcagtttctaattcaagaatagcttcacctttttctacgctatcccctaggtttttcaaccattctgcaatggtaccttctgtaatagattctgctaattctggaactttaacctctggcatgacttatttccccctagttattttttaatgcattttctataattttattttgaacaagtttatgaatttctccatcgccttcagctggagcagccctttgaattctgccatgataacttaaatcatatttatctgcaactagtactttaacatatggataaacatataaccatgcaccttgatttttaggttcttcttgtacccatgacacttcttcaaggtttggtaattgtgctagcaatgcttcaatctcttcctctgggaatggatacaatctttcaatcgcaacgagtaatactgattcgtctggatttttagctaatgcttcttttaaatcaatgaacattttaccagttgccaaaataacttttgtaactttatccgcttgatatgattctgtcaaaattggctcaaatccaccagaagtaaattcatcaattggttttgcaactgttttatttctcagtaagctttttggtgacataacaaccaatggtcgcatttgttcagaatctaaactagctgcttgtgcacgcaataagtggaaataattacttgaactagataagttgacaactgtgcaattattttcagcagctaattgtaaaaatctctctaatcttgctgatgaatgttcaggcccttgaccctcatatgcatgaggtaagaataatgttaatcctgaacgttctccccattttgagcgagaactgaataagaagttgtcaaaaatcatttgtgacatatttgcaaaatcaccatattgcgcttcccaaatattgaagctttttttgttttccacattatagccgtattcaaaaccaactactgctgcttctgaaagcggagaattgtgtatatcaaatgtcgctttttgatcaggaacatgatgtaaaggtgtatatgtttcacctgtttgctcatcatgtaacacggcatgcctatgactgaatgtaccacgttcactatcttgaccagttaagcgaatcggtgtaccatcttgtaagattgtcgcaaatgcaagttgttctgcttgtgcccaatcaactaaaccatcttctttattaaacggctcatgacgcttctcaagaactttgtttaactttttcaaaatgttaaagccatccggatatgttaacaatgcatcatttatttctttcaagtgatcaaacgtaaatgattgttcgtctgcttgtaacggcaatgcaagttctgcaggtttttccatatctggattatccattttatcagctttattaattttatcatgtgcttgtcttagttccttttggacttgttctataaatgaatgcatttcatcttctgaaatgataccttcattaacaagctttttaccaaacacatattcaacagagtcatgtttgcgaatattctgataaggaactggattagtaattgatggttcatccatttcgttatgtccgaaacgacgataacctactaaatcaataacgacgtctttatgaaactcttttctaaattccattgcaatatcaattgcttcaatagtagcttcaacgtcatctgcattgacatggaatattggcacatcataacctttagccacatctgtagaataagttgttgaacgtgcatcaattggttctgtggtaaatccaattctattgttagtaataatatgcaatgaaccacccgtagaatagcctttcaagtttcctaagttcattgtttcgaagttaataccttgaccaggataagcagcatcgccgtgtataataattggcattgctttatgatgatcagtcgtcggagccccagcacgctgcgtatcatcttgtgctgctctcgtacgcccttcaacaacaggtgcaacaatttccaagtgacttggattgttagccagtgcaatacgctgcattgtaccgtatgaatcagtagttttaatgccaccaaggtgatatttcacatcaccagtccatccagcagttaactgcaagctaccatcttcaggtaagaatttcattggatctgtatgcataaattctgaaatcatcatttcgtacggtttttctaagacatgcgttaaaacgtttaaacgtccacggtgagccatgcctatttgtatatttttaataccttctttcgcagcaatcgtaatagtacgttgtaacatcggtacaagtgcgtctaccccttcaattgaaaaacgctttgcaccaacgaagtttttatgaagatatttttcaaacccttcaacatacgctaattgtttaaatagtgcccttttttcgttattatttaacgttactttatatggcgtttcaattcttctttttaaccaaccacgttcggtattgttattaatatgtgtatactcaaatgcaattggtcctttgtaacgtttttccattcttaaaattgcttcataagcattatcataaatgtcggcaaagtgatctgaaacaattcctgctgatataccttccaaagtctgttgatctaaatcaaagtcttcaatctctaatttaggtacatgtttccttttcggaggatttacaggataaatatcggctttaagatgaccgtattggcgaatattatcaatcaaacgcatgacacgcttaattgtgccgtcgctattttgactacttgtactttttaaagctggtacaattgagtcatcattcttaattgtgctgaataagacttgtaaatcttctggtacagatgatggatcttgtaaaaagtcatcatatagatctaacattagacctaaattcgcaccgaagtttacaggagcctctgaaacttcttttctttcgttagtcattttacaccctccacaaaaatgttgaaacgcttacaatgtaataatatcactatttagttatttgttaaagtagatttacctatttatctactaaaaagaagaatcaacaaaagcgttgattcttctaggtttatagatgtattttattgtaaattttgggaggtgaattccacagaaatgataaagaacccctgattatttgttttatagtcgttcttgggagtgggacagaaatgatattttcgcaaaatttatttcgtcgtcccaccccaacttgcattgtctgtagaaattgggaatccaatttctctttgttggggcccctgactagaattgaaaaaagcttgttacaagcgcattttcgttcagtcaactacagccaatataacttcgtaaagcatagaacattgatttatgtcccagcctcacttaaaaaattgattctatgactttgattgacgtcttaaacatgattaaaatatgattttaaacgttgttcctttgttaatctcacttttaattttaatcgatccaccgtttaattgaatgattttttgcgcaatagataatccgagtccattaccaccttgacttcttgaacgagatttatccactcgataaaagcgatcaaaaatgaaatcttgatcttcctctggaataccaattccatgatctgtaatttcaattattttttgcttattttttaaccttgtcttaactttaattttcttattcttcacatcatatttaattgcattatcaataaagattaaaaataattgttcaaattgatgaggtttcattttaatttctagatttttagatgtcagatccgtatcaaattgataatcaggatgcaattgttttaatgagtgtattcgcgagcgaatttcatcattaatatgcacggtctgcgcttcagaagaaatgtcatttacatctcctttagtcaattcaagtaattcttcgactaattttatgatacgattcatttcttcaatagaaatatttaacgattcttctaatactgctgggtctttttttccccatcgctgaatcaaatttaaatgaccttgaataatttgtaatggtgttcgtaattcatgtgatgcatcttcaacaaattgtctttgttgattaaatgattcttcaatttggctcatcatctcattaaacgtatttgctaaattatctatttcttcataatttgtatttaattgcaatttattttgaaaaccatctcgtcggatctcaatcattttatttgataaactgacaagcggtttagtaatttgagttgaaaatacataactaattgtggcagttataattgttgcaatcactccaaatgcgagcgcaataatatacaatgattttacgatgttatcataattttctagtgaatgaattaacaaactataccctttgaaatcttgcgttgtgattggttctttaataattaaataatcaatgcctttataacgtttttttattacgcggtcaaaataccggtgttcataaccaggttcaactctcactgtgttatcattcgatgtctcaaataatttattattatgctcatcataaataataatctcttgaaaattacctaaagatgcattcaagtctaatgcagatatatctttaacaggcttagaatgaaataaattattaatatcgcttgagcttctttctgcatcatcaagctcactattatgcagtgtatctttcaagaaaaagataataattaaacaaaacaaaaatatcgtgacaaacgtaatcatcgtggtaacaataatccagttattgcgcaatttacgttttgtcatcgtatcacatacccaacgccacgaactgtttcaatcattttgtcacgatcgtatggttttaatttgtttcgtaaatatcttatataaacatctacgacatttgtttctacttcactattataaccccatacatgatttaaaatttgttcccgttgcataacatggtttttattttcagctagaagatatagtaaatcatactccgtttttgttaattcaatttctgcgccatttaccgtcactttaaaagcattcttatcaattgtaataccgttgacatcgataatatctttttgtggctgacgacgtaaaatcgcacgaattcttgctaaaagttcttcaatatcaaatggcttaactatataatcgtctgcaccgtaatcaagcccagcaactttgtcatacgtatcacttttcgctgtaattataatgataggtgtagattgttgttgtctaattttgcgacaaatttctaagccattaattgacggcaacattaaatctaatatgattaaatcatagtaatggctaagcgctttatctaaaccgtcttgtccatcatactctgtgtccacattgtaattttcatgtgtgagttccaattcaagaaatcttgctaagttttgttcatcttctactattaaaatttgcgtcatttgtacacctcatattacggctttttctaataaggtaatatattttaaattttgtatttttctatacaatagttgctttttaaattagtttgtttacgtttaaattttatcacaaatcaataaccatgttttaaatttttcaagctacaatcattaattatttattaactcaaatatttaataatcagttaatggaattctgttaattctgattgcagtacttaaatatagaatactgtaacacaaggtcttaccgcaatatcaattgttgtcgtatactgacttttattaatgtaaaatgaatagttattatctttattttcacaaaatgaccgtagtttaaacatttatcacacatcatttcaatgtgcctgtttgaacttgcaagtaacatttcttaatgtatgaattcaaaagaagtatgtaacaatataatttttaagcctcatcacttttaaatattctaattctactgagaaatacaaatttttttattttctaaaatagcgtaatcatgcgttttatttactattcttaaaaaatattcaaaaaaagttttagtttctaattgacaatgattctcactaatgtataatagtagttgaaaatgattatcaataccacatagaacatcccccccacaacgtttcgttcttgttggattggtcattttcaaatattccccttttatatgcccgtaaaagacaatatacgttataacaacgttttataaaagcagtaaacccttacgacactttaggtttactgcttttgtttttttactatttaattgattaatttatttctaagtaataacgttgataaaataatgcaaaatacgccaccaataatgccggcaataatatctgttggataatgtacacctagatatacacgtgatatggaaatcaataaaatcatagctgcacataaccctataagaataccttttgaattaccttgatttaatcgatttaataaatagatactacttccaaaatatgcagttgatcccatagcatgaccgctaggaaaactaaatcctgttatatcaattaaacgcagcaatgtaggtctttctctatcgaatatattttttaatgctggattcaaaattccagataatgccattgttaatgcaaaaaataatgcttcaattttgtggcgctttaacatgagatatgccacaagaagtaatgaaatacataacattgcccagacttcacctactttagtagccccaagcatgatagatgtcgtaataaagctctctgatgaatatataaattcataaacttcattatcaatccatttccctagtcttgattcgtggaaaaacgcgataattccaaaaaccaatgtaaaaacgatgagcaaagagatacgtttccattgactcataaagcattaccccccattaattcaatgcgtctttaatcatcttatcaaataaagcttctttcgtataactttgttcatacgatttcatattattgataattcgagttctttcctgttccattttatttagctcttgtaataaaatttgtgctgtcaattgttcttcatcaatcgttttagcataacctttatcagcaaaatgatttgcattgtcaatttggtcgcctcgggattgatctaaacctaatggtactaataacattggtatacgtaatgttaagaactcatatatcgcatttgaccctgctctacttattactgtgtccgtaattgctaataaatctgttaaatcctctttaacaaattcatattgtatatatcctgattttttaacttgagcatcttttaatcctttaccagttaaatgtatcacttgatattgttgtaataatgcatctaagttttcgcgaataatgctatttaattttttacttcctaagcttccacccataacgagtaacacttttttattttcattaaagcctgttaattgataaccattatgtgcattaccattttttaaatcttctcgaattgttgctccaataaaatcagctttctctttaggtaggtagtttagcgtttcttcaaatgttgtatatattttcttggcaaatttaagtgctatcttattcgctaatcctggtgttaagtcagattcatgaataatagttggtatatttaatgatttggctgcaataacaactggcacagatacaaatccaccttttgaaaataatagatcaggtttttcttttttcaaaactttacgagcatcaagaataccttttaatactttaaatacatctttggcattttctaaagaaatatatcttcttaatttaccactcgaaataggataatacttaatttctggtagttgtgattcaatcatttctctttcaataccatttttagaaccaatataaagcacttcataaccttgtgataatgcagttggaattaaacttaaatttactgatacgtgtccaactgttccccctccggtaaatgcgattttcgtcattaatattacctctattcttttaaatttttataatacgcataaaatggttcacctttatcatatggcggatattccattaattgttcaccgaccttatgaaatccaaatttggcaaataaaccttgtgcaggtttgtttaacgcaaaggtgtccgttaaaataacttctgcaccacgtgctttaactaaatcaataacataattgaataattctgtagcagctcctttatattctttcgaaccagttaatcgatgaataacaaaagcgccttctctatttactggccagtcaatgtcatcataccattctgcttggtcttggtcgacaacaataaagccataaattttgtcattttcctctaatacgtacaaataatctttagcaatatcttcttcaaaatgttctaaaagagggtactgatcgtcccattgctcgttgtcgtgttctttcattaattcttttgcttcttctactagatttaagatttgatctaaatctgacattttacctagacggatcatgtacgtcactccttatatcgttatgttaaacatgtttttcagtacatgttaatcttacacactattagcatgctttaaacctttattatgaatgaaaaatagtaattatcacactatgggataaaaataaccaataaaagtatcatataccaattaattgattgttaaaactagtgaataatactatttaaaaagtatatgctcatagtatattaaagcatgaattgttaacagcgatgatagaaattgtgttatttacatcatttgtaaatgtctaatttatatcttttagagttagacgtcaataaaaataaatacgcctcctaaattgctatctttgcaaatttaggaagcgtgtcattaacataataataataaaattttagtagtgtgtatcgctttattttaaaatattaatcaatttatcgagaacatcatcatgtttattagctttttcaactaataactcagtaaatttattattcgtttctttattaaattcaccagttacctcgagtttattcgcttgttggaaagctttaactagattttctaaagcttgatcaaattgcgttgattcattatcaactttataacctaaagctgataaaccaattttaatagttttaatatttttatcatcgtctccaactttaaatgttttcgtattaggaatgacatttaaagattgatatttaggtgtgtcaatagtaacgtctggtttaatgcctttaccgtgaatataatgaccatctggcgttaaccatttcatttcagtatattttaacaacgaaccatctttaaactctcttgtagtttgtacgacacctttaccgaatgtttttgacccataaactttagctttattatagtcctttagcgcaccagtaaacacttcagaagcactagctgaaccttcattcactaagatggatatatccatgtctttcgcttcttttaacgcatcattagaagtttgaattgcttcagtatctttacctttttctagtttaacaacagtttttcctttatcgataaaaatatttgccattttaacagcttcatctagtagtccacctggattatttcttaaatctaaaacaatctttttcaaaccatctttgtgagctttaagaactgcatctttcaattcacctgatgtatcattctggaatttattaatagtaataactccaaccttaccttttttcttatactcaacgcttttaacatgaattttttcacgtttaatcttaacgtctttttcttcactgcctctttgaacagttaaagttacttcagtgttttctttaccgcgaacgtctttgacaacttcgtctaatgcttttcctttaattgattttccatttactttagtaatgacatctttaggacgaatgccagcacgttctgctggagaacccttcatagggctagtaaccataatttgatcatttttcttttgcatttctgcaccaatacctacaaaatcacctgaaacaccttcattaaaggatttagtttgttcttttgttaaatattcagaataaggatcttttaattctttgaccatgccatcaattgcagctttactcaacttgtcagagttctgttttttataataatcactatttaagattttatacacattttcaattttatttaagtttgcttgatcagttttgtttaaaccacttattttttgatttataaaaatatatgcaacaactgtgatgacagctgttattatgattgtaccaattaaaattgatatgaattgccaacgttttaagtgaacgcgtttcgatgaattagtttgttggtcttgattgcttgttgcattttcagcgcgttcatcatcggatgaagttgtgtgttgcttatcatccattgtatcacttccttattatgtacttttaaattctgtgtagttaatcatatcaatttatgcaagatagcgcaccatatttcactataattgattaatttttagtcacaacttagtttattttaaatgacggattgtaatattaagtgcaacacctataaaaattcataaaaaatgcccataattggcactttgttgtaagatgttaataaccacaaaaacacatacaaggagtgccaacatgagctataaccatcttacactaactgaacgcgcacgtatagaggttttacgtcaagaaaattattctttaagatctattgcacgtaaattaaaacgatctgtatctactatctcacgtgaaattagtaggaataatttaaatcagtcatatcaagctgaaacagctcaaaaaaattatgaaaccaaaagaaaactttgtggtcgtcctactcgatttactccagaacttggtaatatcattaaatattatttaaaatgccactggtctcctgaacaaatcgtaggtcgtctattacaaaaccaaatctgttttaaaaccatctatcgatggattaactctaatatgattaatttcgaacttatttcatgccttcgtcaaaaaggaaaaagacagaaacctaaagaaactagaggtaagtttaatattggccgtcctatttcacaacgtcctaaggaaataaagaaacgtaatacattcggtcattgggaagctgacacaattgtatccagcagaggcaaaagtaaagggtgcattgctactttcgcagaaagaaaatcacgttattattattgtgtacttatgcctgatcgttcctctaattctatggagacggcaattaataaccttatcaaacatctacctaaaggtgccgttaaaactattactgtcgatagagggaaagagttctcttgttatcaaaatattgaaaaccaatttaatattaatgtctacttcgctgatccatattccgcatggcaaagaggtacaaatgaaaataccaatggtttactaagagaatttttccctaagaaaacagacttagctaaagtaaatcaagagcaacttaactatgcattagactcaattaattatcgaccaagaaagtgtttaaattggaagtttccttatgaagttttatgtgatgaactgttgcacttaaattgacaaatcaacaaattaaaaccaggataacaacttgcatcaccctggttctaactattattattaaaaattatattaaaattttagccattccgtatattcttcatatagatcatcaaatacagacattggcaatgtgaaatcaccatgtgtctcaatataatcagacagtatgttaaaatcatcatcgtgttttgggaaagcaagatcgtcaaatatctcttctgctagacgacctttatcgtcgtgtcgaccacgcactgtcatgacaaattgataaaacgaatagtttttcattagttcattgtcacatcaatcactttagtttcacctttaatcacagcattttcatcataaatattaatagaagccgcttgatcagtgttagtaattataattggtgaaataacagatttagcattattattaatatattcaaggttgaatcttactaatggatctccgacgttaacttcatcaccactagacactaacacttcaaatccttcaccgtctaattgaactgtgtctaaaccgatatgaactaataattctaagccgttatctgcttttaaaccaattgcatgcttagttggaaagacattgtcaacacgtcctgcaattggagacacaacttctccttcagttggattaataccaaacccttcgcccatcattttttgtgcgaatacaggatctggaatatcttcaattttcacgtattctccagttaatggtgcataaattgcgatatctttctgaacttctttgccttttccgaataattttttaaacatactttccactcctacttatcaaaatgtgatattaaatcgccataacccaattcttctaatttttcatatggaataaattgaattgcagcggaattgatacagtatcttaagccgccactttctttaggtccatcattaaagacgtgtcctaaatgactatttgattcttctgaacgcacttcagttcttaccataccaaatgatttgtcgactaattctataatttcatcgtcatcaagcgctttggaaaagctaggccatccgcactcagaatgaaacttttcttcagatgtaaataaaggtttaccagaaatcttatctacataaatccctttagcaaaatgattccaatattcattcataaatggtggttcagtgccattttcttgtgtaacaatatattctatatctgttagttcacttttatcttttttaagcattttgattcccccaatgtgattctataaacgcttttctacctgaaccacgttgatattggtaataatgtaccgggttctttttataataatcttgatggtagtcttcagctggatagaaatttttatatggtttaataggtgtaatcactggtttcttgaaaataccttgttcatttaattgttgctttttaaactcagcagcctttttctgatgcttatcatgatagaaaatgactggttgatagctttcgcctctatcgaaaaattgcccttgatcatcggttgggtcaaatgttttgaaatatatgtctaatatattttcaaaggaagtaacctctggatcaaacgtaatttgtactgcttcgacatggccggtttgattcgtacatacctgttcataagttgggttatcagcatgaccgccactataaccagatacgactgacttgatgcctggatatgatgtaaatggtttaaccatgcaccagaaacatcctcctgctaatgttgcatattcttttgtcatatgaattacctcctctatctatctaattataaatttagtctataaaggattgaaatggaagtaattaacactgaaaagattaaatttacttcttaaggactacgaggccaatcgcaccttgaccagtatgtgcagaaataactggtgtagttacatttatatcgtaattatccacatgaaaagcttcattaaaaactttcttcaatttatcaacatattcaatgacgttagcatgtgcgacaccaacggatttgatttcatgatctcctataaattcagcaatttcctttttcaagtattggatactagaattttgagttctcgcattgtgcacaagctctaagcgaccatcatctagtgtaccaattggtttaattttcataagattaccaatcaaaccttttgttttactaattctgccacctttaattaattgattcaattgccctataactacaaataatttaatgttttctcttaaatgatttaactttttaactatttcagaagttgagacaccttcttttacaagctctactaggtgttgtatttgataccctaaaccaaaagaaatagattttgaatcaataacagttacattagcatctaccatttgacttgcttggtaagcagtgttaaatgtaccacttagtcctgaagaaagatgaatacttatgatttcagaaccatcttttcctagttcttcataagcagatataaattcacctatggctggctgacttgtctttacatcttcatcattttcaatatgattaataaattcttctgatgtaatatctacttggtcaacgtatgaagctccttcaatagttaaacttaaaggaattacatgtatgttgtttgcttctaaatattctttagataaatcggatgttgagtctgttactataatctgttttgtcatggtcgttttcccccttattttttacgaattaaatgtagaaaggtatgtggaattgtatttttctcatctagtttaccttcaactgaagaggcaacttcccagtcttcaaatgtataaggtggaaagaacgtatcaccacgaaatttaccttcaataacagtaatatacatgtcgtccactttatcaatcatttcttcaaataatgtttgccctccaaatataaaaacatggcccggtagttggtaaatatcttcaatagaatgaattacatcaacgccctctacgttgaaacttgtatctgaagtaagtacaacatttcgacgattcggtagtggtttaccaatcgattcaaatgtcttacgacccattactaaagtatgacctgttgataattttttaacatacttcaaatcatttggtaggtgccaaggtaattgattttcaaaaccaattactcgttgcaagtcatgtgcaactagaatggataaagtcatgattatcctccttcttctatcatttcatttttaattactaagttatctttaatttaacacaatttttatcataaagtgtgatagaaataatgattttgcataatttatgaaaacgtttaacacaaaaaagtacttttttgcacttgaaaatactttgatgtcattttgatgtctatatggttagctaactatgcaacgactacactgctattggagcttttattgctggatgtgattcatagtcaacaatttccaaatcttcataatttatgtcaaaaatagacttatcactgttaatttttaatgttggaggattgaagctttcacgtgctaattgtgtttgaatcgcatcaatatgatttgaataaatatgtgcatctccaaatgtatgcacaaattctcctacttcaagtccacattctttggcaataaggtgcgtcaataaagcgtagcttgcgatattaaatggcacacctaaaaagatatctgcgctacgttggtataactggcaacttaacttaccatcttgaacataaaactggaacattgtatgacaaggcggaagtgccattgtatcaatttctgttggattccatgcagatacgatgtgtcgtcttgaatctggattatgcttaatttgctcaattactgttttaagttgatcaaaatgattaccatctttatcaacccaatctcgccactgtttaccataaacatttcctaaatcaccgaattgcttcgcaaatgtatcatcttcaagaatacgttgcttaaattgtttcatttgttctttatattgttcgttaaattcaggatcactcaatgcacgatgcccgaaatctgtcatatctggacctttatactcgtctgatttgatataattttcaaaagcccattcgttccaaatattattattatactttaataagtattggatatttgtatctcctttaatgaaccataataattcggtcgctactaatttaaaagaaactttctttgtcgttaatagtggaaatcctttagataagtcaaagcgaagttgatgaccaaatttcgaaatcgtacctgtatttgtgcgatcatttcgtgtatttcctatttctaaaacttcttcacaaagactgtgatatgctgcatcaaatgaattcaacatatgcgataacacctcatttttattatttatagtatgtatatttagttcgatataatttaactttatgtagcattttgttatcactcattttaggaatatgatattaatatcatgaattccgttactttatttataaaatgatgattaagtacctgccacatcataacgtgatctatgtttccaattgctaattgtttacccaaatctataactttaatgctaaaaaattttaaaaaagaggttaacacatgatttgaatattatgtttgatgtcctattaaaacagttaaatttctagaaaatatagttggtaagaacgttctttatataacaaatggaatacaactatattctctattttcaatgacagacaccatttttaatattataaaatgtgttaacctttatatttatgtgtactatttacaattttcgtcaaaggcatcctttaagtccattgcaatgtcattaatatctctaccttcgataaattctctaggcataaaataaactaaatctcgacctttgaataaagcatacgaaggactagatggtacctgctgaatgaattctcgcattgtagcagttgcttctttatcttgcccagcaaaaactgtaactgtatttgtaggtctatgttcattttgtgttgcaacagctactgcagctggtcttgctaatccagctgcacagccgcatgtagagttaataactacaaaagtagtgtcatcagcatttacttggttcatatactctgatacttcctcgctcgtttctaaacttgtaaaaccattttgagttaattcgccacgcatttgttgcgcaatttctttcatataagcatcatatgcattcatatttaattcctccaattaaattgttctgttcgtcatttgtttccatactgaaccaagtgcttcatctccgttttcaatacgagatatggccatttcaatttgtaatttaacttcaaacgcattgtcattaatatgggctttaagtgcgggaagctgctctgcattaccttcatcaaagataaacatagcagcacgccacctaacgattttctgtggatcatctaatagtagcaccatttctggtagtgcctctggataccctaaatcgcttatgcaatcccctgcagttcttcttacagcaggacttttatcacgaagccccttatataaatacggtaaaatttctttactttcaatcatacctaatagtacaatcgcttgacgtctaaccggtactttttcatcagataaagctaaatcaagcagcggtatatcttcaaaagtcggctttggaaaatgatttaacattcttaatcgagtcttccaattatcagtcgcatgatattcatccaaagagacatgtcgatagaaatgataattattagttgcgtgattttcttctaaagcatgttttaccaatacaggtaactgtgattctggataggtagctagtacttcttctaggacaccatccattacttcttcaatatttccatagcgatttcctaaatctagccatttacgcataaaaacaatattgtcatgttttgtttgcgcttgagtcatatgatcaacatatgtttgtggtaattgttctcttaattcttggtcagcagaagttagcttaatttgatacggtatacccttaaaagttaatagttcagctttaatttcaccaaaatgattgtcaatttgtgggtcttttccagattccaacacctgactttcacctgaaaaagcagctttaatatcaggtagtatgtcttcccaatcagcttttggtgccttatcaacagctaagaagttcatgacatgaaaaatggaagtgataccatctatagataacaactgatttataaatcttggttgattttcttctacttttttataagtattagataacttgtcttctcttgtatatgacaaaacaactttcattgtatttggactaggtgttggctctatacgtaaaatttccatatactttattccccccgaatactagttgatgaaaaatttattcgaatacagcctctacttttggcaatactgtttcccaatttgcgtcattttctttatctactgaaataaagtccataacatggaaaattgatttaacgccttcaacctttaagatgtcattaataaatgctggctgtgaatcatcaactttagtatacgtatctgatgtcataccttctctgctttcactaagtgtaatcttcattgtgttgtggttcggtgtttctgatatagatataatttgcatttgacttcctcctattgaagttcatttcctaattgttttatttctttccctattgaacactcattgatacaaaaatgatgcgccttcgttttcccctctaatttacgcagacgagttttgattggacattgattgcaataagtattcattaaatcatctattttcgcgagtgcattttgctctgaataagttaaaatacgcgacacttcctttattacttcaaaatattgcaaccttgtaaataagtgttactgttttaaatttgacataaaaatattataacatttttgaccctaagatttgaatgaaaccttttacaattctatacgtaaaatgtatttatattcaaatgctattgcatcgcaaacgatttttcagtaaaatgagtaagttatttattgagcggtttctaaacacccgtatgatcaaaatttaggaggacattttaatatgtataatgaaattttaggactagttacgtttattgcaacgttcgtgcttatggtacttatgtatcgcttttttggtaaacaaggtttaattgcatgggttgcaattggcacaatcattgccaacatacaagtgattaaaactgtagaaatctttggtatttcagcaactttaggtaatgtcatgtttgcttctatttatttagcaacagatatattaaacgatatttatgggcgtagagttgcaaaaagagcagtttggttaggcttttcatcaacattaattatgattattgttatgcaattgtcattacattttattcctgcaccagaagatatggcacaaaaagcattacacgcaatctttgatgttgtgccacgtatagctttaggctcaattgtcgcatatattattggtcaacatattgatgtatttatcttttcactaattaaaaaagtatttagttctgataaaacgtttttcatccgtgcatacggtagtacatttttaagctcaataattgatacagctatatttgtagctatcgcatttatcggaagtttacctggtacagttgtatttgaaatatttattacaacgtacgtactaaaattagcttcaacagttttcaatgtaccatttggatatattgctaaatcattttatcgtaaaggtaagattgataaattagatcaaggctattaaagcacttactacataaaagaataagttttaaggctgatatttgagaaaattttatcaagatgatttttttaggaagtatattacagtactacgtattagaaaatcatctttgactcagcgagtattttaaacacgtgttacttatttaagtgatgcgtgtttttttatggattacccaacgtattttgtattacagtaatagtaactttaactaagtattgaatagaaagtaggtttattatggcgaaaataaattttgatgctgcgacgaaaggaaatccaggcataagtacttgtgccattgtaatcaaagaagatgagcagcattatacatatacacatgagttaggtgaaatggataatcacacagcagaatgggcagcatgtatttatgcactagaacatgcacgtgaattaaatgttagtaatgcgttgttgtacactgactctaagttaattgcggatagtgttaacgctggttatgtaaaaaatgccaaattcaaaccttattttgatcaattggaaatatttgaacaagattttgatttattatttgttaaatggattccgagagaacaaaacaaagaagcgaatcaacatgcacagcaagcattgtacaaatttattaaaaagaacaaataaaaggagcaccgactgatatattttcaatcggtgctcctctttttatcgaagaaacaaattattttttattttttttagatttctttttcttctttttagctgctacctttttagaaggtttttttgatgccgactttttccctttggattggttatctttttgatttttctttttagccaataataaaggaacgtcttcatctttagattcaatactagttgttgtttcaacatttccatctttatctttgagtcgttttgcgattaagaccggtgaatgttcgttatcttgcaacactttttcatctgtgttttcatttgtaacttccacatcttcttcatcttcttttctgcgacgtttaggtaagaagaacggcgtatgtttaactttatcgagtgactcgtcattgtttagcgaatctttttcttcaacaatagcatcttcttcatcttcttttctacgacgtttcgcaaataaaagtggtaaatgtttagtaccttctattgaacctttcttcttgtctttgctattatctctaatttccaattcttcctcttcatcctctttacgacgacgtttcgcaatgaagaaccagaagctagcaagtaatccagaaataccaacaacgccaagtgcgtttttgataacattaccaattcggtcaccgaaatgacgcatatgaagtggatcgatttcatcatcttgatccaatttcttcttatgtccaataggcgaactattgaatggatgatttacagtgccataaccaacgtgtaaatgactattagattgaccatctgaatttgatgaaggtttgctatgatctgatgttacaatttgtactgctaaaattcgtgcgataccattattcaatgcagcctcaacttgttgtggcgtttgcgcattattaatatctttgattgtttcaagcacaatttcgttaattcgattcattgctgcttgtctttcttcagcagttccaattgtgctatttctaatgcgatcaattttatctgtagaaatatctttaatttttgaaatcgcagcttttttacggttttccaattctttagcaaatggattggccgcttttagttgcgctttaaattgctctaattgttgcgcaatttcatcgatgctttgcgcacgttgaatcgcctgaattgattgatcttttaactgatttaatttagatatagcttcttgcttctctttatcagttaaatccttactagcattaatttcatcaatcatatgttggatagcatcagaaattgatttaatggcatttgatttggcttggtcaattgtaaattgatctggattgaattgttcaatatgcgcctgttcttggtgttgaacttcttccaccgtatgaacatctgctgcgttgttaatttgctcaatagcttgttgtttaagcttattaacttccgcaatcgcagcttctttttgttcaggtgttaatgttgcgtgattattgatttcattaatcttttgttgtgccgcattttcaattgattcaatcgcctgctgtttaactactgtcaattctttttctactactttcacaggaacattaacaatcacttttgatccatcaagcaatgttacttcaacttttgctgttaaactatcagaaattgttgcagttgacggtgtatcaataatttccgctgtaagttgatcaattaagttgatgtgtgcaagaatatcttgttctgtaatgatgtcatcacgatggacaatgagttcgccatttacaaggatttgttcaggagttgcgtcaaaaatttcatttacagcaggttgtgcatcaacttcccatacatgtgtatttctaatatcatctaatcctaaatttaatccttgatttaattgatctttagtttgagcattttcaatgttttctagtgctcgtttttcagcttcgtcaatttctttgagcgcttttgctttttgttcaagtgttaaatcagggtttgaattgatttgatcacgcttcgcatttgctaatgctttaattgcatttttcgcatcttctttagctttcactaaatctttaatgtcttgtaatgcttgtgcaagctgcgctttggcatgctcaatttcttctttagtcatcgcattgttaatgccgttatgaccttgttgcaagatttgatttattcgatctttaagcgcttgtttttccttatctgttagatttggatttcgatcaatttcgtcaattaatgcttgaacttgcttatcaatatcttgtttcgcgctttctttagctttcactaaatctttgatgtcttgtaatgcttgtgcaagttgtgctttggcttgttcaatttcttctttagtcatcgcattgttaatgtcgttatgaccttgttgaagtatttggttaattcgatctttaagcgcttgtttttccttatctgttagaattggatttcgatcaatttcgtcaattaatgcttgaacttgcttgtcaacatctttattcgcatcaattttagctttcggtatttcattggcatgcacttgttcaatcgcatggttgccagctgtttgaacttgagatacatcctgattacttgttgctttattaatgttgttgatgatgctgtttgccaattcttctgctttatttttcgcaataagcttgtcttgatccgtcgcatttgaagcttcgatttcttttagcttattagctaaagcttgattaatagattgaattgccttgtctttagcatcttgtagtcgttgatcaccattaagattttggattgcatcattgactgtttgaattgcgccgttaatatcattcacatttgtgttatcactatttagcaatgtatttgctagacgtttagcatcatcgaagtttgttttagcattatcttcagcgttttggtaattgacagtttgctctgcatttggaatttcattgtcaactaaatgtttcaatgtttccattgcatcatttaagtcaatttgattattaacaatatctgttacatctgatacagtatcggcattgttaattgcattatgtgcaagatgttgttgctgttgatttaatccatttaacgaattaacaaacgcatttgctttatctttggcatttgcaaggttttggtctccatttaatgcattttgagcatcaataatattttgtttcaattgctctgcttcagcttttgcaattgcattaccttgcactttatctaactcatgtgctgcattcgcaattgcattatcataatttgctttcaaattatcatctgcattgatgtaatttgtgctgctgataacaccaaggtgctgttcgtcaatatattgttgtactgcacccattgcattatctaatttagttgctctattaattgctcgagatgctttatttagcgtttcagcattattaatttgttggattgctaattgtctttgagcattgtttagatgtgttaattgatccaatctttgtaatgcttcagacttacgattattaagtttttcttcaccatttaatgctttctttgctgcagtgactgcatcatttaatttgataacttgttctgcagttaagttttgacctgtcgatttatcaagtgcttgtttcgctttatcaaccgcttcatcatacacttgtttaacttgtgtatctgcattgacatagttcgtgctacctttcgtgcgtccttcattgccagtgatttcttgtgacaattgatccattacacgattaagtgccttagcctcatctacaatttgttggatttgatttaaatcgtttgattgatcgatgcgacctttaaatccatcttgttgagcattgtttaatgcattcaattgctctatatcatgtttaccatttgttttagcaagtgctacacgttcatcaccatttaatgcttgttttgcatttaaaatattttgaagtgcttgatccacttgttgcttattcgcattttgtttcaatacattttcggcatcagcaatagcttgtttataagcattttgcttatctaaatctgcttgtgtgtaatctacagtttgctcaacgttagcatgttcattaactgcttgttgtaattgatccattgattggttcaattgcgttgcttgatctactaattcagcgattggttgaagtttcgtcgcttgatcaatattttgtttagcagttgcaatttgatcagcatttaaatgtgttaattggtcaatagtttgtttcgcttgtgttttagcttcagcgactctctcattaccatttaactcattcactttttcttgaagcttagttaatgcttggtctacagcgtctttattcgcatttgaaccattagttggatctgtaatgctttctgcagcttgtaacgcttgatctactgcttcttttttatcagttgacgcttcagtgtaatttggttgagccttatctgtattcacttgatcaactttatttttcaatgtttccatcgcgtgatcaagttcagtagcagtttgaacatgttgtgcaacctctgttcttgtaggcgctgcatttatagcatcagttaatgcttgttgttgtgcatgatttaagtttggcaatgcatttacagttgttactgcttgttgttgatcacgagcaagtttttgatcaccatgtaggttatcttttgcagttgttactgcttgtgtcaattgttctacttgtgatttgtcgagtgttggattacctgtttggttaattaaatcttttgcattttgaactgctgcttggtaagcatctttttgcggtttatcttcattgataaacttgctaccagattctgtttgttgttgatcttgaatactattacgtaatgcttgcattgcttgatcaagcgcttttgcttcagctaatttttgcgctacttcatcacgagttgctgcgttgtttatttggctttcaagtgcttgacgttgcggattattcaaaccatttaattgatttaaatcagtaaccgcatgttgtttatcgtctgcaagtttttgatcaccgtgtaggttatctttagcttggttaacagcttgtgtcaattgttcaacttgtgctttatcaagcgttggattgttagtttgattaattaaatcttttgcattttgaactgctgcttggtaagcatctttttgtggtttatcttcattgataaacttgctacccgcttccgtttgctgttgatcttgaatgctattacgtaaagcttccattgcttggttaagtgcttctgcttcagttaatttttgtgctacttcgccacgagttgctgcattattgatttgattttcaagtgcttgacgttgtggtgtattcaagttagacaagttatttaacgtttctgttgcacgttgcttatcttgatctagtttttgatcaccatgtaaattgtttttagcatcagtcactgcctgtgtcgcttgatcaatgattgatttagctaatgtaggatcagttgttttgttaatcaaatctttcgcgtgttgtacagcttgcgtataagcatctttttgtgcttgatcttcattaataaatttactacttgcttcagtttgtggttgatctttaatactttcttttaatgctttcatcgcttcatttaatgcttgcgcttgtgcaataatttcagccactttatcacgagttgttgcattattaatttgattttctagtgcttgttgttgtgctggtgttaattggtctaaatgatttagagaatttccagcagtttgcttatcttgcgctaatcgttcaacaccgtctaatgcatttttagatgatgttacagcttgtgtcgcacttgttacattacctttattgatagttggattatttaatcccgcaatgatagactcagcattttgaactgcttcatcatatgattgttttttattcggttctgcattgacatatgcactgctcgcacgtgttgcatctttgtcagcaatactttgttgtaatgcatccataagttgatctaatgcttgtgcttcagtcaaatcatggttaacggctgttctagttgtttcactatcaatcaacgtatcttccatatgtttttgagcattgtttaaatgtgttaattgactaactgtttgtttcgcatgatctttatcattttgtaatttcacatcaccatgtaatgctgctttcgttgtattcacagttgtcgctgcttgattaattgcattattatctaatgttgctgtttgttcattgataatattatttgcggcttgcactgcttgatcgtagttttgttgttctgattgatcttcgttgatatatttgctatttgctttagttgctgcgttatcttgaatactttctcttaagccatgcattgcttggttaagcgtattcgcattttgttcaatttgatgaactgcagttactaaagttgcagcagtaacttggtcttttaatgctgttttttgaggatcatttaag

SEQ ID NO: 14 - DNA, 2756919 bp, Staphylococcus aureus subsp. aureus 55/2053 (residues 1,378,461-2,756,919 of 2,756,919)
cttgttaaagcatcaattgcttgcgtcgcatttgctttagcaacttgtaaattatgatctccatttaacgcttgaagtgttgtttgaactttagtaatagcttgttctacttctgtttggttcgcattttgaccagtttgtttgttaatcatggcttctgcttcatttaccgctgtagtataagcagtttgtttatcagtatcagcattgacgaagttaccaagttgttcaacggtttgatgatctgcaatcgcattaattaagttacccattgctgtatttaaagattctgctgtttgtttgtgaccattaactgcagcaatatcagatgattgcgtaatttgtgattgtaactgttgcttttgcgcattatttaaatgatctaattgatcaagtctattgttcgcttgttgcttagctgctacaaggttttcatcaccatctaatgcaactttcgtgttattcacttgtgtcgttgcacgattaacttcatctggattcattgtaggtgatgttgtttggttaatgatattattagtagctgttactgcttggttatagtcattttgtctttgcgcagttgcatcatgataatcttcagacgctaatgtcgcttgattatccgcaacactatttcttaataattccatcgcatgatctaacgcttgtgctttttgattaattgtagtgacatctgtaacaagtggcgcttgtgtaatttgactttcaaatgattgtttttgtgcatcatttaagtgtgttagattcgccagttgttgtttcgcttgttgcttagcattcgctaaattatcattaccatttaatgcttgtttcgctgcgttcacttcattagtgatgctttcaacttgtgcttgtacttcattagtaccactttgtttattcaataatgcttcagcttttgctactgcctgtttatacgcattttgtttgtcaggatctgcatttaagtaattaccgtccgctaatgtttgagctttatcattaatagcttgtgataattgatccattgcatgatctaggctcgttgctgtttgtttaacttggttcactatagcaatttcaggcgattgatcgatttgtccttttaatgcttgtttttgagcatcgttcaaatgcgtcattgcattgacagcatctttagcattttgcttttcagttgccaatttagcttcaccgtttaagccatttttagcatcagtcacttgagttaatgcacgagtaatatcatctgggttaagcattggatttgtcgtttgattgataataccttccgcttgagacactgcatttgtatatgctgtttgcttatcggcatcagcatcgtgatagttttcacttgctttgacggtatctttatttgcaataccttgtttcaagttactcattgctgtattaacattttgtgcattttgtttagtttgttcaactgtagctaacgcttgtgcttgattgatttgattacgtaacgcatcacgttgtggttgatttaagtcacgcaacgtatctagatttgctattgcatcttgtttcgcttgcgctaatttttcatcaccgtttaatgcatctttcgcttgattcattgtagtaactgcttgtgttactgcgtcaggcgtcaatacaggtgttggtgtgccatttgcaatttgttgcgcttggttagctgcattgttatatgcttgttgtttgtcttgatccgcttgtgtaaagtcaactgattgtggtacttgactgtttgcttgaatttgttgtttcaacgtacccattgcattatttaatgcatcagcattttgcttaatagcattaacacctgtaacaagttctgcatgtgacacttggtcttttaatgctgttttttgtgtttgatttaagtttggtaactgatcaatggcagtattcgcattgtctttagcaacttgtaagttatggttaccgtttaaatcacccttagcttgagtcacttgttgtaacgcttgagccacttgttgtggatccacgtttgcatttggtgtaccactaatgatttgttcagcatgtgctaccgcattgttgtatgcattttgcttatcagtatcagcattgacaaagttaccatttgctttagtttggtctttatctgcaataccttgtttcaattgtgtcattgcttgatttaaatcttgtgctgtttgcttaatcgtgtttacatttgcaacagtttgcgcagcatcgacttgttgttttaacgcatctttttgcgcttgatttaaatcattcgcatttgtaatcacttgtttcgctgcatcttttgcacgttgtacattgtcattaccattcaatgcttgtttcgcttcgttcacgcgttgcatcgcttgttccacttcggtttgacttgcattgctgccatttgctttagataaaataccttctgcatgtgcaaccgcattagtataagcatctttcttagcttgatctgcatcagtaaagttaatgctatttaatgtctcagttttatcttgtaatgcattacttaagttagtcatagcattattcagattttgagcattttgcttaacattattaactgttgcaatatctggtgcttgttcaacttgtgttgttaacgcttgtttttgcgcatcatttaaatgatctaatgtgccaagatttgtcttagcagcttgtttagcatcagctaatttttgattaccgttaagtgcttgatttgtatcattcactttagttaatgcttgttgaattgtatttggatccattgttggatttgttgtttgttttaacaattcttctgcttttgttactgcattatcatatgctgtttgcttgtcagtatcagcatcgtgatagttctcgctacctttaatttgtgctttattcgcaataccttgtttcaattgtgtcatcgcatcattaagcgtagttgccgcttgttgaatagcattgacgtttggtacaagtgttgcttgcgtaatttgtttgctgtattcatcacgttgcgcttgattcaagtttggcaattgatcaatagcatgttgaacattttgtttcgttgttgctaagttcgtattaccatttaaatcatttttagcttgtgtaactttatttaacgctgcagtaatttcgctaggtgtaacgacaacatcaggtgtgccgctaattaatgcttcagcttttgctactgcttgtttatatgcattttgtttgtcaggatctgcattgacaaagttaccatcagcttttgtttgttctttatctgcaatgccttgttttaattgtgtcattgcattgtttaactcttgcgctgtttgtttaacattgtttacaccagctacagtagttgcattttgaacttgctgttttaatgcgtctttttgtgcttggttaaggtcattagagctattaattaatgctgttgcttcgtctttcgcatgttgaacgttggcattaccatttaatgcttgttttgcagcattaacttgttggattgcttgttcaacttcagtttgtgttgcattgccaccattagcttttgaaatgatgttttcagcatttgtaacagcagtgttatatgcttgttgttttgcttgatctgcatcagtgaagtttactgttgctttcgtagcatctttgtcagcaatcgcttgtttcaagttacccatcgctgtatttaagttttgcgcattttgtttaatttgatttgcttcatcaacagtatgcgcgccattaatttgatcagtaactgcttgtttttgcgcattatttaagttgtctaatgaacctaatgattgtgtcgcttgttgtttcgctgcctctaggttttcattaccatttaatgcatttttagttgtgcttacttgtccagcagcttgattgataacagtcggatctaaagttggacttgtcgtttgatcaataataccttgtgcagttgtgacagcattattgtacgcatcctttttattcggacttgaatcagtataattttggttttgttttgttgtcgcattatctgcaatactttgacgtaatttgtccattgctgcatcaacattgtttgctttttgttcattaccttgtgcttctgcaacagtagtcgattgttgtaccaattgttttaatgcctctttttgtgcatttgttaaatggcttaaaccgtcaatcgctgtatttgcgtgttgtttagctttttcaaggttttgagtaccattaagcgctgcttttgtagtattcacttgattcatagctgcttcaacttgatctttagacacgtttgtacctgtagatttatttaaaatattttcagcattacgaaccgcttcattgtatgcatttttcttctctggatctgcatctgcaaagttttgactgccaagtgtagtgtctttatcattcaagctatttttcaagttacccatcgctgtatttagttcctgagctgtttgaatggcttgcgttacttcagcaacagtgtgcgcttgattgatgtttccagtaacagcacctttttgtgcattgtttaagttatctaacgtagataatgtttggtttgcattgtttttagcatctgttacttttctatcaccattcaatgcttgtttagtagttgttacagttgaaagtgctgcttcaacctgtgattggttcgcatttgtaccatttgcttgattaataatattttcagcagcagttaccgcattgttgtatgctgtttgtttttctggatctgcatctgtaaagttaacactttgtttcacttgatctttgtcttggattccgttgattaaacgttccattgcttgatctaattgttcagctttagttttcacttgacttactgtgctaatatttggtgcatttgtcacttgcgtatttaaatcttgcttttgagcattatttaaatgacttaattggttgatgttggcagttgtttcttgctttttatttgctaagttttgtgcaccattaagcgcagttttgttagtgttcacttgattagctgcttgtgttactgcagatggatcaagtgtcggctgactcgttgcattaatgatattttcagcacttgtaacagctgtgttgtatgcattttgtttatctctatctgcatcaacatatggttgactcgcttttacttcatctttattcgcaatactatttcgaagttgattcattgcattatcaagatttgtcgcgttgtctttcacactttgaacgccagttacttgtgtcgcattatcaatttgaacagtaatactttgtttttgtgcatcagataaatgtgtcatttgacgtaatgcatctttagcctgttgcttcgcagttgctaagtttgtatcaccgtttaaacctgtttcagcattattgacacgttgtgttgctgctgtaacatctgctgcatttgtaatcacattaggtgaaccatttacaatgtttttcgcagcattatatgcatcagtataagcaccttgcttatcaggactcgtgttagtgtaattaccaccagctacaattgtgtcatgatcagcaattgcttgttttaattgatccatcgcattattaagtgatgtagcactatttttcagatcagttacacctgatacacgttgcgcagcattcacttgttgttttaatgctgttttttgtggtgtattcaaatgtgtcaagttatcgatagcttgcgtagcttcagttttagcacgttgtaagtttgcgtcaccgttcaaagcattttcagtagacgttacactttgaattgcttgttcaacagcttgcttatctttattcgcaccgtgatctttatttaagtatgattctgcttgtgtgatggcattatcaaatgctgttttgttagttggatctgcgtcgatgtaattttcgctcgctttagtttgatctttatttgcgattgctgattgtaatcgttgcattgcaccatctaagtcttgtgctttcgttttaacaccatttacaccgttgactgttgttgcgccttcgatttgtgatgttaaatcttgtttttgtgcattatttaagtgtgttaatgtgcctaagtttgctttcgcatctgattttgcttgtcttacatttgcgtcaccgtttaaagcattcttagcagtcgttacttgatttaatgcagcttcaacttgtgctttcgtcatattttgaccgtgtgctttatctaaaataccttgagcattcgtaacagcatttgtgtaagcatctttcttaccttggtcagcatctgtaaagttcacttgttgtttaacagtgttttggtcattaataccattttgaagttgacccattgctgtatttaactcattagcagtattttgtgcagcagttacgcctgctactgtcgttgcattgtcaatttgactagttgctgcagttgattgcgcattattcaagttactatatgaagctaatgcacgtttcgcagtttctttagcttgagcaactttattatcaccattcaagtcatttttagcttgattcaattggttaagcgctgcttgaacttgtgtttcattcgcgttgctgccattagcattagtaattgcttctgcttgtgtaaccgcagtatcatacgcttgttgtttaggttgatccgcatctgtgtaattgacactacgtttcgtattatccttttcagcaagtgcatgtttcaaattacccatcgctgtatttaacgatgttgctttatttttagccgctgtgacagctgcaagatttggtgcttgatccacttcagcatttgccgcagttcgttgtgcattgttcaagtctgttaaacgaccgatgtctgatttcgcagtttgttttgctgctgctaatttttcatcaccgttcaatgcagacttcgcactgttcacttggctcgctttttgattaatcgtatctggattcatttcagggttattcgttgcactaataataccttcagcattagttaccgcatcattgtatgcattttgtaaatctgtattcgcatcatgataatcttcgctcgctttagtcgcatctttagaagcaatgctttgtctcaattgattcattgcttcatttaaagtaccggcattagcttgaataccttgaacacctgcaacagtcgtaccgcgttcgatttgcgatgttaagtttgctttttgagcatcagttaaatgtgacattgtcgctaattgttgtttagctgtgttcttcgcttgatttaatcgcgcgtcaccatttaatgcagttttagcagtattcacacgttgtaatgcttgttcaacggctgctttattgtcatttgtgccagctgttttatctaataacgttttagctgctgttacagcatcattgtatgcagtttgtttatcactatctgcatcagtatatttctgagctgcttttgtagctgcttcatcattaataccattttgtaagttgctcattgctgtatttaattcagatgccgttgcagacacttgatttacacctgcaactgttgtcgcactatcaatttgtgatttcaacgcttctttttgtgcattattaattgatgttaaattatttaatgcatttttcgcagttgtcttagcatttgcaacattttgattaccgttcaaatcgtttttagcacgttgtacattttgtaacgcagattcaacattgtcttttgcagtatttggaccttgtactttatttaaaatttgttcagcttgcgtcactgcatttgtatatgcattacgtttcgcttcatctgcatcagtgaagttaacaccttgcttaatcgtattttgatcttgaataccatttttcaagttcgtcatagctgtatttaatgcgtccgcattattttgcgcttgtgttacttcactaacatgcgttgcaccttcgatttggcgttttgctgcatctttttgtgcattagttaagtcacttaagccattcaaatgttgtttcgcatttgtttgtgcgtttgttaagttttcttgaccgtttaacgcttgttgtttagctgtcacttggtctttcgcttgattgatttcttgagcattcattgttggacttgatgtttgaccaatgattgcttttgctgcagtgactgcactatcgtattcactacgattattaggacttgcatccgtgtagttttgttctgctttaatcgtcgcctcattcgcaatgctatctcgtagacctttcattgcagtgtttaatgtttgtgcattatcacgaacagtttgaacatttggcaacgttgtcgcttgacccacttgttctttaagttttgctttttgcggaccatttaaagaagttaaaccatcaattgctgtgttggcattttgtttcgctacttctaaattatgattaccgtttaactgcgtcttcgcattcgttacttgcgttgctgcgtttgtaacatctgatggtgttaacgttggtgttggtgtaccactaacgatattttctgcagctgtcactttttcatcatatgcttggcgtttattcgcatcagcattgacatagttaccactagcttttgtgtcagctttatcagcaatggcacgttttaaagctgtcatcgcagtatttaattcagtagcagtatgttcaacaccatttgctacagatacgcgtcctgcacttgttacttgtgctttcaatgcttctttttgttttgtatttaagtccgaagcatttgtaatcgctgtgttagcagcctgtttcgcacgttctaagttttgaataccgtttaatgcagtattggcttgtgtaacagcttgcattgctctttcgacatctgctttaggtgtattaccgccagatgttttatttaaaattgtagctgctgcatttactgcttgagaataagcagttcgtttcgcatcatcagcatcttgataattttgactttgtaacgtcgtgtctttatcacgaattgatgtttctaattgacccatagcaccatctaattgttgcgctttggctttaactgtattaacaccttcaacatttgttgcttgtgtaatttcattatctaacgctgtacgttgtgcattattaatgtgtgttaatgtacctaacgtttgtttcgcagcggctttagcttcatttaatttagcatcaccgttcaacgctgtcttagtactattcacattttgtaatgcttgttcaactgctgctttgtctacattttgaccactagcttttgttaaaattgctttcgctgcatttactgcttgatcataagctgatttcttacttggctctgcatctaggtatttctgagtttgttttgtttgtgtctcatcattgataccattttgtaaactgtgcattgcgttatttaattcagttgctttgacagtttcttgatttacaccagctactgttgttgcaccatcaatgctacgcgttaacgcatctttttgtgcattgttaattgatgttaagttattcaagttgtttttcgcagttgtcttagcttgagctaagttttgcgcaccatttaatgcttgttctttagttgtcacttgcgatgttgcttgcgtaatagtgtttggttccatcgttgggttcgatgtttgattaatgattgcttttgctgcagtaactgcgctgtcgtactcgttacgattatttggacttgcgtcagtgtagttttgacctgctttaattgttgcttcattcgcaatactatctcttaagcctttcatcgctgtattcaacgtttgagaactatttttaacagtttgaacgccatctaatgtagttgcactttgaacttgttcttttaattttgctttttgtgcattattcaattgcgctaagccatcaattgtattgttggcatgctctttcgcaacacgtaagttgttatcaccatttaatgctgttttagctgcattcacttgtgaagttgcactatttacgtcattgactgttaatgtcgcattcggtgtaccattaatgatattttcggcgttagtcacttttgaatcatacgcttgacgtttttcttgatcagcattgacataatttccgcttgcttttgttctttctttatcagcaatagctgctttaagtactgtcatcgcgccgttcaattcagtagctgtatgttgaacgttatttgcatcagatacacgttgtgcattgttaacttgtgtttttaatgcatctttttgtttttgatttaagtcatgtgcgttattaattgtgttcgtcgcatttgttttagcttgagctaagttttgtacaccatttaacgctgcttttgttgtattgacttgatttgccatgccattaatcgcattagcatccatatttggattgttcgttgcattaataacaccatttgcattatttacagcagtattgtaattatttttgttgatatcagatgcatcaagataattttgacttgttttcgtcgtattatcattttggatacttgtacgtaatgcacccatggcagtatttaatgtattacctttatctttaacaccatttacaccagctacattttgcgcttgttcaacttgatgcttcaagttgtctttttgtaattgtgttaagtgtggtaaaccattaatcgtattagttgctgaagttttcgcatttcttaagttgtcagcaccatttaaagccgctttcgctcttgtaactgcatttaatgcattatcaacgtctgctttagatgtgttaccaccagtttgtttatttaaaatgccttcagccgctgtgacagcttgcgtatatgcatttcgttttgattcatccgcatcaagataattttgatttcttaatgtcgcatctttatcattgattgaaccttgcaagctattcattgcgccgtctaatgtattggcatttgttttcacagtattaacgccatcaacagtcgtcgcttgattgatttggccttctaagtcagtacgttgtgcattcgtaatatggtttaaagtgcctaagttttgtttagctgccgctttcgcttctgccagtttagcatccccattcaatgcatctttcgtacttgttacttgttgtaatgcacggtcaactgctgctttatctgaatttgatccagtttgtttatttaaaattgctttcgcagcagctacagcttgatcataagcagttttcttactttgctctgcatcacgatatttttgagtttgttttgttgcattttcatcatcaataccatgttgtaattgacccatagctgtattaagttcatttgcagtttgttggatacttgttacatttgcaacacgttgcgcacttgtaacttgtgcttttaacgcatctttttgcgctttatttaagttagtagcaccatcaatcgcatttgttgctgtttgtttcgcttgcgttaaattatgtgtaccatctaatgcatttttcgttgatgtcacttgtgtagcgatttggttaattgcattagcatccatatttggattgcttgttgcattaatgacaccattagcactatcaacagcattgttatagtttgttttgttactttctgtagcatcaagatagttttggccatttttcgtagctgcgttatcttgaatgctatttcttaacgtacccatagcaccatttaatgtgttggcacttgatttaacagtatctacacctgcaacattttgtgcttgttgcacttgttgtttcaatttatctttttgagcagttgttaaatgttgaagtccgtttatagtagtgtttgcatttgatttagcttgctctaaattatggttaccatttagggcacctttcgcatttgtcacttgtgacaacgcgttttcaacggcagctttgtctaaatttgatccactatttttatttaaaatattttctgcgttcgtaacggcttgagtataagcagttttcttatctgaatcagcatcatgatagttttcgctcgctaaagtattcgttttatcattaataccattttgcaagttagccatcgctgtattcaattgcgtacctgtattagataccgcttcaacaccagatactgttgttgcttgatcaattttagttgttaagtcacgtttttgtgcattattaattgaagttaaattatttaatgcatgtttagctgcattcttcgcatttgtgacattttgatcaccattcaatgcatttttagcgctagtaacactttgaatagccgcttctacatcttgtttaggcgtatttgcaccttgcgttttgttcagaattgtttctgctctgcttaccgcatttgtatacgcatcacgtttggctttatctgcatcagtgaagttaacaccttgtttaactgtgttttgatcatggatagcttgttccaagttgcccatttgcgtgtttaactcagttgctgcatttttagcagctgttacctcactcacatgacctgcacgatcaatttgtgatgagattgcagatttttggttatttgttaagtgtgataacgtatttaagttttgcttagcagtgttttgtgcatttcttaagttttcagcaccgtttaaaccatttttagcattattcacttgtgttgtagcttgggtaatcgcactagcatccatagtcggattgttagtttgattaatgatacctttcgcatttgacacagcgctattgtatgttgattggttattcggacttgcgtctgtatagttttgacttgctttgactgttgtttcgttagcaatactatctcttaagcctttcattgcattgttcaatgattgtccatttgtttgaacagattgtacgtcttctaatctattggcttgtcccacttgttcttttaatttagctttttgaggtgtatttaattgcgttaatgcatcaatagcagtattggcgttttgttttgcaacacgtaatctttcgtcaccatttaattcttgttttgcgctgtttacttgattagctgcagctgttacttctgaaggtgtcgtaacaaccgttggcgtaccgctaataatatgttcagcattggtaactttagttgtgtaaacattttgtttagtgctatcggcgttaacaaatttactgcttgctaacgtagtcgtcttatctgcgatggcatgttgtaattgacccattgccgtgttcagttcagtcgcattacgttgtacatcttgtgcattagatacgcgttgagcaccattagcttgtgcttttaatgcatctttttgatgttgatttaaatcagatgcgccattgattgctgtaatcgctgcttgtttcgcattatttaagttttgcgtaccatttaatgcatgtttcgcactattaacattattaagtgcttgttcgactgcagttttcgctgtattcggtccagtttgtttatttaaaattgtttcggcatttgatacagcttgattgtaagcattacgtttttgctcatcagcatctaggaagttttggctcgctaatgttcctgacttatcgttgatagccgtttgtaagttacccatagcaccatctaaactattcgcactttgcttaacagattcaacaccagctaagtttgtagcttgtgaaatttgatttgttaaatcattgcgttgtgctgtagtgatatgcgttaaagtacctagatgttgtttcgctgcgttttgagctgcaattaatttggcatcaccattcaatgcatttttcgcagttttcacacgttgcaatgctgcttcaactgcattttgcgcagtgtttggaccatgttgtttatttaaaatcgctttagctgcagtaatagcattatcatactcttgttgtttatttgtgtcagcatcacgatatttctcagatgatttcacttgagattcgttgttaataccattttgcaagctagccatagcttggtctagatgttgcgcattttgttttacagtatcaacactactcactcttgtcgcactactaatttgactaatcaaattgttcttttgagcatcagtaatacttgtcaatgtgtttaagtatgtttttgcatttagttttgccgtagctaagttttcatcaccgttaagtgccgttttagaactattcacttgctctgctttttgtgtaatcgtacttggattcatttctggattactattcgcattaataatcgtttcggcagcagctactgcgttgttatatgctgtttgcttatcattattagcatctacgtaatcttcacttgctttagtcgcatctttgttggcaatactttatcttaacgtattcatcgcttgatctaatgtattcgcatttgattgagccgtatgaacaccagcgacagtagtaccactattaatttgatttgttaaatgcgttttttgagcagttgttaaatgcgtcatattatttaactgctgtttcgctgtttgctttgcttgatctaataaacgcgtaccatctaagttatttttagccgaattcacttgattcatcgcttctgtaacttgatccttcgttttattttgaccatttgatttgtttaaaatatctttcgctgcttgtaccgcatttgtgtatgctgttttcttacttggtgtcgcatcttgataattttgactatttaatgtcgtttgttcatcattgattgcaccttgcaagttacccatcgctgtatttaaatctgtaccttgttgtttaacagtatttacaccagcaatatttgatgcagcattaattttagatttaacatctgctttttgagcattatttaaatgtggtaatgcatcaattgcacttgcagcatctgttttagattgtgctaatttttcatcaccatttaatgcatttttattagtagtaacagctgaagttgcactgttaacatcattaacagacatcgttggatttgttgtttgattaatgattgtttcagcacttgaaacggcgctattatatgcattttgtttagctgtatctgcatccgcataatcttctgtacgtttcacttgctctttatctgcaacagcttgtcttaagttacccattgcactatttaagttagttgcattttgcttaatcgtattaactgtctcgatttgatgcgcaccattaatttgcgattgtaagttttgacgttgtgcattattcaagttatttaattgacctaatgctgtgttcgcttcttgcttcgcagcatttaacttagcttcaccattcaatgcctgttctttacttgtgacatttgataaagcattgttaacatcacttggtgttataactggatgttgtgcattaccattaataatgtcattcgcatggttgtatgcattgttgtaatcatttttcttattagtatctgcgttgacataattatcactttgtacgacttggttatgattagcaacgccacgttttaaacctgtcatagcagtatttaagctttgagtcgtttgtttaatatcatttactgcttgtacattttgtgcattatttacttgttgtgttaatgcattcttttgtgtttggtttaaatcacttgcatgcgtaatcgcatttgttgcttctgttttcgcacgttgtaagttttgttgaccatctaaagcgccttttgtagatttcactgtttctgctttttggttcactgtattaacatccatcgttggattagtcgtttctccaatgacacctttagctgcattaactgcattgtcatacgcttgtttattagccgttgttgcgtcagtgtaattttgacctgatttaatcgaattattatccgcaacactgtcttttaattttgtcatcgcattatttaaagctgtaatgttagacttgatcgtttcaagtgcagcatgatttggtgcagcattaatttgttgcgtgaaattattttgttgtgcttggtttaagttagatgcaccatgtaatgttgtaaacgctggttgtctatctaatgttaaaccttgacgtgctgtatttaattgatccttagcttggtttgcctctgccactttatcattgatattttggaccgttgggttgccattcaacacttgattaatttcagttaacttttgacgcgctgcttgtaatttttggttgtacgcatttaacgaagcggtcgtcatacctgttgtatccgttggttgattaatgctttgttctaattgcgttttcgcagtttgaagcggtgctttatctggtgttaaagcttgacgcgcatgatccaaatcagatttcgcttgatttgctgcagacgtatttgtattaatttgatctacagtaggtgaaccagctaatacttgattgatttgttgaatcttattacgtgcagctgttaacttcgcattgtatgcattaatagaatcttgcgtcataccagttgtacttgtttgcgtatcaatactttgttgtagttgatttttcgcattttctaaaggcgccttatctactgttaagccattgcgtgcttgatcaagtgctgttttagtagcattcgctgctgtcacgttttgtcgaattgttgcaacatctggatgcgatgctagtacgcgatcaatttcttgaattttagttctagctgctgaaagtttgtcattaaatgcagcaactgatgcacttgtcatacctgtcgtgctcgttggttgatcaatatcattttgcaactgagttttcgcagcttgtaatggtgccaagtctggtgttaatccggcaatagcttgttttaagccattatatttttcttctactttagttttttctgcggcaatttgttggtctgttgcgtcaccattgttaataacattttgtgcatttgttgattctgtttgacccgcacgtttagcattttcatatgcttggattgatgattgtgtcataccatcagtagttactgatttattgatttcttcatcaagtttcgttttagcagttcttaaagcactattatcagctaaaggtactaattgattaatagcttgcgttaatcggtcatttacacgatttacattcgttaatgctgtttgtacctcttgcactgatctaattggcttctgaataatagcgttggcactatttttagcacttgttaagtcactttgaagtgcacgaatcgaattattgtatgcagtgatacttgctggtttcttacctgtcgttgtacctgtacgattcaattgatgtactgcttgctctaattcatgtgtatctgctgttaaattttgtttcgcttggtttaatgctgttaatgcgttatcgacacgatgtttttcatctgaaatttgttgtgctgttgcgtcaccattatcaatgacacgttgagctgctgtaatttcagattctgcttcacgtttcttcgcattatagttatcaatactttgttgcgtcataccagtagttgatggtacttggttcacagaactttgtaagttatttttagatgttactaattggctattatcttctttattttgaagtaatgctttagcttcatttatcttagtttgtgcagcttgaactttagataatgctgcgttcacttgttgtggtgttgcacgctcatcattaatcacttgttgcgcttctgttttcgcagtattgatttgttgttgcgcattatgaattgcattattgtactgcgtaattgtacctggctttttaccatctgtactcactggatcatctaaatgatttttagctgtgattaactcacgtttatccgcttttgtgaaaatggactcttgtacttcttcagtactgctatcattgtaagttactgtcacagggatcgtcgttgtactaccaccagctaaattagtaggcattgctgtgccatttttaatcgttgcagtacgtttattagcaacttgaactgcattgttaatttcagctgctgttacatttgaaccataatcttttacaatttcagttgtgttgacagtatgtgctgccggtgcagttaatgtacttggattactgcttgctgagtgaccagtacctgctttcggtgtaatggtgattgctgaatttggcttaatagtattggcattgaacgtcactttaccagtatgtgcatctagcgttacatagtcaggtttattggcgattgtccattgattattttgaccacgaacagcattaagtgtcttactatgttctgcaccattacccactttttcagtgtaagcaatatccattgcttgagttggattaattaaatgtccagacgggttattaggcgtgatatcaacatgaccattttgccaaatcttagtagtcgcttggttcggttgaggtgcgacaactgtgaaatcatcactacgttgttcgtcactgattgtttcaccactaccttgtgttgcaacagcttgaattgtatcagcaggattgaaagtaccagctgcaacagtaataccattattcgttccagcaatacctgctacatttgctgcagatgcttctttcacccatggactcgtattattatgacgagtaaatgtcgtcacaacattaccattacgtttaataactaatttatcagcgtatgtcgttacgttaccggcatgtgtattcactgtttggtttgctccaggtgcaatcgtaattactcctgctgccgtttctgtaacagttggtttcgctggttgaacatcttttactacaaacttcgctggtagagatgttgcaaatgtatgtccattatagatgacatcatattttgcattaatgacttgtgcagtatttggtttattcattgctgcccagtttgcatcgtttgtacctgttgctgcattattccatttatacgtaaatccatctgttggtaaaccagtagcattttgtatatgtgcatatcctgatgcttgcgtaccacttgctaaagtgccaccaactgttgttgtataagaagtttgagggaattcaaattgatatacattcacagtaacaggtacacgttttgcagctgaaatacctggatatgttacatcgacatttaaatgttgaacgcctgcttgttggttatttggttgttgtctatttgcccatgctgcagtgataccatttgtgtttgtatttggatcaaatgtaatgtagtttatcgcatccgttccattagtcaaattttgacctttaacatcacgagatggcgctttggcattagcaactggataaactttgacaggtacttctacattacgtgtcccttgaccatttggtaatgttacaaccgcagttttatgagtgtttccgactgtattcttccatgtatctggattatcatgccatgcaaccgttgccccatgtggtggattttgaataaatcgttctacatgaccgaaatcaaaaccgtcgccacctttaataaatacagcgccttcagtagtcgcttgtaattgaggtgtcacatgtacagaagcactgtcatttgaatcaacagattcatttcttgttacatctatagctcgtccatgttcgtcttgtgtcgtataagttacattattcattgaaatcgaagatcttgctttaatttcaccatttggtaacgcatcacttacagtaactactgcagtatttccactaccataagtcgtgttagtaattgttaatggtgtattatctgctttaaataatttaatagaagaactacttaaaacattattaatcttgatttgttggttagttaagcctgctttgtatgtcacagagtttccgtcaattctcggtggatcaggcttaactttagataaaatcttgataatttgtgtttggtgattatcataagtaactcggatatcccttgttgaaatacctactacatctttacttggtccatatgaatttgtaaattggaaattcatatgttgcgcatttgtcgaccaagaattatttactggcttaacatattgtttcgcatcatacatatctgaaacacctgggtataagacacctctggctgtttcaaagacttgctttggtacagttcttaccactttatatgttgctgttttcgtaattggggttgtttcaccatcaattaagatatgtgcagttacattgatatcttgacctatagttgtgttatttttgtttggcgcttgaccacttacccatgttatcgtcgcatctggaatggcactaccattcgataatttaaagtaatcagatgcacttgctccattacctgttgggaagtcttgcccttgtacagtgtaatgcgaatgtgcaacgatttctggaataacatgctttacaggtactgtcactgttgatgttgttccatcttgataagtaacagttacagttacttgtgcgttatttcctgtacgactcacattactcactgttttactagtgatttcatttgcacttgctgttgcatagtttctatttggtgcattgcttgtaaacgttaatgaattaataattgctgtttgatcagcttgcgatactgtcgcattattcgaaatattggcaattctcactggattagcagccgttgatgatgttccaactcgatatttatcacgtaaaggtttaattgtgacattgaatgacgttgttgcagtattaccgcttgtatcagttgcaaccaaattaattgttttatttgtagtagatgtcacatttggtgctgttgctgaaacatgttgatgattattatcaacagtgcctgtcaattgtgatgtcgttggtactgttacagattgcacaccaaaattatcattcgctgtaatcgtattggtaaatgtttcaccagagaatacttgatgatttgtgtaattacctactgaaatcgttggatttactagatcactaggtacaaaataaatgttaattgcttcattcgtattgtccgtattttgatttaaatgttcaacatattgttttggtccatatggcgataagtataactgcgctttataaactgcatcagctgcattatgcgtagaattattttttactacatgatctattgtaaatgcacccgcaccattagctgctgattcattaacactaacgacagtcgagttactgtggttcgcacggacatttgaatttgtaacaggttgcccaccaaatccatttgaaggattaataatatccattatttgaatgacttgaccattcaacgtaaattgtcgttgaccatcagatgttggatttgattgtgaataaccagttgttttatagtttggtctaccaccagcttctgcttgtgctttttcattaccagcaatgttattacgtaatccaggcaccgttgttgtcgcttttaacaaagttaaaatatcattcgtcgtaatttgcgtacctaatgttgcatcatagcgataaattaatgatttatgatcatcagaccatgataaaccaccatcagtcggtctatttgcaatttttgcgtttgtccatgtcactgtataatcttgagggaagttaacccaacgtaagaagttcatattattaagatttgatgtgaacgatttcgttaatcgacctttatttatattgacagtaatggtactcacattagaaccattcggtgtatttgttactgaaatatctccttctgcaaatgaaatcgcatctctattggcattgataaatgcttgtttcacttttgaaatttcatcagtagttatatcatatgttgacatacgatatacacgttgatcaccttctggttgtttcacatcaatgattttcaaagtgatatagaaatcttcagtgtctttatgatacgcatttgtagcaactatatgatatagctgtgtgccagcgttcatttgactaacttcttgcgcagttggaatcgttctatccgatgtaatgtttgtaaatgaactgcttggaatcgcttgtccattacttaaagtgaaatattgtttgatatctccaatattaaaagattgccctttagcaattgtaaccgttgccgttttagcagcattagcagtttgatattcaggcttaacaactggttcgtatgtcatcacgtttgtcgcatcaagcgtagttgatgacccatcacgatattgcaatgtgacattaccatgattatctactgtaactggatttgatgaagctaaataacctcttatattttggtttttattcataaacgcagtagtaatacgttgcttttcatcaccagttaaagcagtcggatttacaacgacaactttttcagaatttcctaagacaattggatgcgcatcatcactaattttacctacatgcactgtcacatgtttagactgactatcattcgtcgtattattgacattgtcggttgctgacactttgaatgtaatatcactattataggcctgattcatagagactctacctgaaatagctaatgagccgtttttcttgtcggatttagttaaatttgatgtccaaccacttggcaatgtcgtaatagttgtactttttaatccagaatgtctatctgaaacccccatagtaaagctaacttcatcgccacgataatatttcgcatttaatccaactgggttattaattgtcggtggaatatcatcaggtaaaatagttactgcattactcatatttgaggcaactacattattgtaaaatattaacgccctaatttgattacctaccggaggtataaatactacataatcttctggtcgtatcgttatcgttgaatgaaccccatcaggtgtacccgtcgcaatttttgtataacctgatggtatttgatctgcctcagaaccaccatctcttgtttgagacgtaggtataactaaatatactaatgcagatggatccaatggaatatccgtaacggttacaggtaccttttgtaatgctgtacctcttaattcttctgctgttgtagtaattctaggcgtatgtggcttaacacgaatctcgaataattgttctttacgtccaaatcgtattgttccaaagtaatcgcctggtaataaattaccaaccagttcaatattacgttctctagcattattagttctatttgttgaattctcaatgtgtaatgtacgtggaatacctgtaatttgccaatctttatctgtaaagttttcattacttgttaaattaatacgtaacggttgtatagatgttacactaccacctaagtttactgaagcattcccttgattacctgcatatacatagaaaaccggatgtccagcttgttttgaagcaggtttatcagcaatattttgaccgtcatcatttttaaagaatttaatgttatgttgaatttcaggtaatactgttaagttaacaggcactaaagtttcaccgttaccaaaagcatcaggatagtcgaaaccaatcattaatcgtattgggctgccagttctagctgcctgttgcaatttatcatcagtaaataattgacttaattgatattcatttaatggattgactccacccggtctaaaagcgttagtgtttgcactagttggataaaaacctaatactttattacttggtgtcttaacataacttaatggatcatccataaagtcatctatatttaggttcgtactttctaataccttttttgtttgtacatttccttgactcacttctactcgtttagttgtacctatacgataagtacgattaaccacttgtcttaaaccattaagacgttgttgatagtcttgtgttgattcgacatataactgactatacataaataattgattgtattctaaagcacgcccacctgctgcatagtacagcttatcaattgttggaccttgcgttttaaatgaaatcgtataacttgcatcacctttaccaataaatgtataaacttttggtacaccaggtgattctgtcggcctttcaccattaatatattcgaatgtttgtctaccaaaagcttttgtagcaggtgttgctccagcttcactaaaatagtcacttgcacgtgctaaatcctttaagctattaatatggacagttggccaatcataaatcacctgcccactcctatttctaattttgtagtcccacgaacgtgagtcgtttaccccatatggccacatttctggaagtggtttgttcgcaccggctcctgcaccgttactccattgtacatttgtgccgtctgcattcactgttacaaactccgttcgaccaactggagtttgtccggccggtagtgcaaaccagtagatcatattttcatgtggtgcatgacctttgttaaacttaatcacccattgataaccgtctccagtttgctttgctgtaataagtgcgatttcttttgcgtctgatgcttttaacgtattccatggcgtagtaggtaaattatatggtgcccccttactagaagcattaatatatgtacctacaggatacccagaaccatcattagcattttcaacgtaatatgatgagtttgcgttttgatagtctgatactgatcttggttctgcagctcttgattcaatcgaacgcgtttgaattctacttgagcgtcgacttgtttgttgacgttgaggcattgtacgaattaaagcaacagcttgttctaattctttgtatgcaagttgcaagtctttattgtttattggatcattactacctaataacgtattgatcttgtcaaaaatgccttttacatagttaaatgtcccagaatctgcattttcgcggtcaataaagcgataatcatggtaattagcatcaaaaaatgcttgtaattcattacgatcgtgttgtacgttaccactatctgatgaatctgaagctgtgactacatttgcttcatgactttctacatgtgtcgctttattgtcgttttcctttttgttagcagcgcgactttcgctttgttcatgcttacttgccgctttagccgattgtgttggcgtagcagctgccgtatctttctttgcttgctcattttgagatactggttggtcatgttctgttgtagatgattgtactgcactagcatctacatggtttgtttgattattatttggttgttcattttcaataggcgcagataatgattgaccattttgtgaattttgaacttctacttctcgattctcagtctgcgtatcaccattttgttgtttctgttttaatgcactagctggttgatttgtctcagcagcttgtgcttgtgatgtgtttaatcctagaaatactaacgtcgcaatgaccgtcgagaatgttccaacggtatacttacgaatactaaacttttgaattttatcacgataattcacagctattgttcactccttatcttgttgttatgtctctgttgtgttgtgaatgtatttacatttgatttcatgtgtattgtaatgctcattccattctcatttaaaaatttaaaacaatgacgattcaatacaatttcgcaatctatctaaaaagtattgaaatacattacaactatgtgttgaacaatttatttatgctacagaatataataacacaaaatatattggtaggtaaattgaatttgtgacaatttataataattataaataaagtagtgtaaaagggtaataaaaaaccgaccttatgtagaatcatttataatgattacacataagaatcggtttatatttttgtttaatattgtagcgacctttatgatttcaatttaattctcaattatcataattgagtgtcgttttgtttaggcacaagtaacaaaatgataacgaatgataaaattcccatacctgcgtttaaccataatgcaatcattgcaccagtatcaatgtttgtcatatttgatacgattgcataaactgcaccactcaatgcgacgccaaatgctcctcctaatgcagaagccattttatagatacctgcagctacgcctactttttctaacggtgcatttgcaattgctgtatctgttgatggtgtagcatatattcctagtcctaaaccaaagaataaataacctataatacaacaaatgacatataatatttctggcaaaaaagttaatgaaatgagacattctccgacaataagaactgctgttccaattagcattggtttcttgcatccgaatgtttgaagtaacttttcaccaacacgaatcataattagtaccattactaaataagtgattgataaacttcctgcttgcaaggaagaatatcctaaacctctttgaacaaatgtgttggctactattaatgttcctgcaacaccatttaacaaaaagtttgaagctgttgcacctgtataagctttatttttaaataatttaaaatcgattaaaggatttgtagcacgcttttcaagaactataaataaactaaaagatacaattgcaattgctaatatagtgataaaaagaagtgaggtaacacctaattctgatcctttagtaattaaaatatttaaactgagaagcataatgactaaaagaaccagacctttaatgtcaaatttatttagagaaatcgatttagatttagtttcaggtgtgcctttaataagaaacagcgcaattaatgaaattataattgataagatgaaaatccaacgccaacctaaaagtgttgcaactgcacctccaaaaaatgaacaaacaccagagccgccccatgagccaattgaccaataacttaaagcgcgttgtctatctttcccaatgtaatatgacttaataatagacaaagttgcaggcataatacatgctgctgaaagtccttgaattaatcttcctataataagtaataaaggaatatttgaaataatgattaataatgaacccaatatatttaagataataccaatgttcgtgagtttaattctgccatatttatcagcaagaccacctgctcctactacaaacattcctgaaaataaagcagttatactaacagcgatattaaccgttccaatatctgtattaaaactatcttcaagtattggtacaacattaaccaatgattgtgcaaatagccaaaacgttattacacttaaaacaattcctattaacaacttattattgccttcaaatgtctctcttgacggcttttccatctctatttgcctccctatacttttgaaaaacagacaaattccataacagaaatttgtctgttcgatagaataattgaatggtttttgattttaatgtgcaaaactttaaatttattagtagtccattcaattattctcaatgctagttatcttaccttatgctgctttttgtttcttcttatagtaataaactggtataccaagtgctgttattagaatcccaataattgccaatataaattgtgtaaacagtgtattaattaatacaaatgatcctgccaaaatagcaattaaaggtatgattggatataacggtactttatatggtcgttccatatttggttcacgttttcttaaaattattaccgcaacaaatgacatacaatagaacaaccaaataacaaaaattaacatgtttgtaattgtatcaaaggcacccattgacatcatgatgatagcgattataagttgtataattgcgccaaaccatggtgcaccagattttgttaattttgcgaataagtggctaaatggcaataattttctttcagccattgcatatggtacgcgcataccagtcatagtatagccattgatcgtaccataaacagatattaatataccgattgtgataatcttaccgccattttctccaaataatatttttgatgtatctgatgctgcatttaaatttcctgcaagtagttctattggcagtgttaataagaatgtagcgttaattaataaatacacagccataatacaaccgataccaactgaaatcgctaaaggtaaatcgcgtttaggatttttaagttctcccgcaacatttcctacatgaatccaaccatcatatgcaaacatagttgctaataaaccactaccaattgctgtaaagaaaccatttcctgaattacctgtagttggaattaatgaaaaagtgatgtctcctgattggaaaataccaaagataacgataacaataattggaattaatttaataactaaggtaactgattgtaaaattccgcctgcttttgaacctaggaaatttatcaacacaatagataacgcagatgcgattgctattggtattaatgaacctatagataaatggaataaattaattaactgtgtcgcaaatacgatagacaatgctgctacgtttgccggaaaataaataaatgattgtgcccagcctgataggaagccccagaaatcaccgtatgtatattctatatactttgttaagccacctgtttcagggattgcagcagcaagttctgctgctgttaaccccgcacaaatggtaatgatgccgcctaggaaccatacaaacaaggccattcctgctgttcctgttacttctgttacgtttgatattttaaagaatactcctgaaccaataactgtccccataacaatagcaaacgctgagaagaaacctatatttttttgtaattctttaccatttgacataattacacctcatttttcagattaaatgttttaacctaccacacccttgcttgtatctgcaatattcagtccatgttcaatgacacctgaaactctagttaagtcaacattcccgcctgaaactaaagcaacaacatttttatcttcaagccatttattgtttatttttccacttaaaattgcagctgttggtaatgcgcctgcaccttcagtaataattttggcacgctgcattaaatctttcatagcatgttcaatttcttcttcagtaacaagaataaattcatctactaaatgtttaactacttcatatgtttgttcaccaggaacttttacatcacaaccatctgctattgtgctatccactcgatgttcagttaaatctctcttatagaaagactcagccataccatgaacattctcagattgaacaccgataatatgaattgaagggttaaatgattttaatgcggtggcaatacctgcaattaatcctccaccgccaactggtacgatgactgtattcacattccaaatatcatctaaaatttctaaaccaattgttccttggcctgccattacaaacttatcgtcatatggatgaacgattgtcatgccattttctttcgctaattcttccatataaagtctagtttcgttaaagtttttaccttttaaaataacctttgccccatagcctttcgttgcttgttgtttcgcttgtggtgctgtttcaggcattacgatagttgcatcaatgcctaataatttagctgttaaagcaacaccttgagcatggttcccagcagatgctgcgataatgcctttttctttttgttcatccgttaagtgattaattttattgctagcgcctctaaatttaaaagatcctgtgaattgcatattttctaattttagaaatacattccctttagttatactttggcttaaatacattgatttaattagaggtgttcgacgaataaatggtttaatgcttgctttagcttcttcgatatctcctaaacttacaatatgtgctgtttgtaatgtaactgtgttggttgtcataataattacatccttccgttttgtaaatttttagtccaaactataatgctatatttaaaatattcatttcactcaatttcatttaaattactatctattcgataacatttaatatttctttataatctaggtcatgtgatgtagctaatccttggtttgtcacttgtccttggtaaatgtttactccagtacttaaggcttcattatctttaattgcttgttctaggcctttgtcacaaatttctaatatataatcaatatttccttgtgctaatgccattgttgaagttcttgggactgctcctggttgatttggtacaccataatgaatcacaccttcttcttcatacaccggatcagaaattgtagttggtctaattgtttcaatagttccaccttggtcaatagctatatcgattaatactgaaccttttttcattgatttaaccatctcacgagtaaccaattttggcggtttcgcaccaggaattaaaattgtagaaataaatacatctgcttttttaatttgttctgctaaattttctggtgttgatttgactactgtgacatctttttctgcatacatatcttcaagatatttaatgcggtcatcgtttaactcgataatgattactttagcatttagtcccaaggcaacatttgctgcatttgttgctgctacgccaccaccgaaaatcacatatgtactaccaggtatatccacattttcatgtacaccagtcactaaagtaccttgaccaccatgttgtgcttcagagtagtaagctcccataattgctgagcgttgacctgctatagcactcattggcgctaataattctgcttttccattttttataatggtttcaccactaatcgcagttacaccaacttcttgcattttttctactatttcttttgaagatgctagatgtaaaaatccccagataatttgattctttttgaaatattgatattcgctttcatgaggttcttttactttgataacaagatcagcttcccatgcttgttcgtgagttacgatcttagcgccttctttttcatacatatcgttagaaaatcctgaaccaatgccagcatttttttcaacaattactttatgtcctgcatccgttaacttacgcacattttcgggtgtgcaagctacacgtccttcaccttgttttaattctttgactactgcaactaacatttgcaacactcctctttcatttgtgaataatttcacaattattttatcctttggttatgaatatgtaaataccattaattaattattcatattttatctataatttgttaataaatatttaatatattattattattcttaaatattatgtgcaattataccactatatttatttcttatactccatttgatttatagttgtattaatacattgactcaaaaactaattaatcaaatatgttttttagattaataaagttgtaactgtactattttgtagtgtatggtaatttatttggatgaaatataattctttatactctattgattaatcaaatatgtatctatcaaaattcggcttatttattcactctgacatattcaaatacgcaaaaagactatttctaccttgtatcgatagaaatagtctttttatacttaattggtttaatttttcataaaatcttatactttttaaaaatgggatgaaatatattttcctgaaacatgtaattcatgttcgttacaaattgataaaatatgattaagcgttgttgcaaatgacattttctcaaaaagcgcttcactatcaattggtacttgtgtgtgaatttcagcaagtcgcttcgataaatatagttcatctaaattgtcatttatcttattacgttgaccagctgataatgcatcaatgttttcaaccacattttcaacgctttgatattgctgaattaacttaatagccgttttctcgccaatacctttaacacctgcatatccatctgctgtatcacccataaacgctttaatatcgattagttgttgtggttcaagagcatattcttcgttaaaacgatgtaatgtatatctattataaatgttaaaaccttttttaattagccagacttcaacattgtcattaatacattgcagtaaatctttgtcgcccgtaataatatagacatcgttatcagttgaatattgttgtgctaatgtacctataacatcatccgcttcatagtttttaacgccaatatttacaaagccaaattgctctgaaatttctttaacataatcaaattgtggtatcaattcttctggtggtgcagaacgattttgcttataaccgtcaaacatatcattcctaaaagttgattgccccatatcccaacatacagctacatgtgtagggcgtatttcatgtattgccgaaaagatatgacgcacaaatccttgtattccatttgtaggtacaccttgtgaattgtacataaattgtttatgaagacttgtagcgtagaaatgtctaaataatagcgccataccatctacaagtaatattttatttggcatttaaaacgttccttctttcttaatataaaatagttttcagttgttgatgtttatctttcaattgattgataagtgttgtatctaaatcaaatgctaataaatcgtttatttgcgtttgaatattagcttcaaaactttcaaattgcgattcagcttctacagccatttgctttacatataattcaagctgttgcctcaataatcccatttgtggttgtaataatcctaacgtactttgacaaattgattcatgtatatctctttgcccatttggattcaaaattttacgttttgttaattgtttaggcaatgcatttagcatatcgttgaaatcaatgtgcaataatggttgctctatattagctgattcaaagttaaactgaggattaacaatgacatgtaaatctgctaattgttgaacgattggtgcaatttgctcagtgagttgatttttaaagtatttttttatacgttctgtaattaaagattgctctaaaaacaatcgttgatgaatttgatctaagtatactttcgtagacactttcttttcttcattaaaatcactattttgcgtcatttgagaattaaacactgatttaatatcgtctagtagttgtagttttaaacgggcatttaaatgataaacttgttcttcaacttcgttgtctgtatgttgtagcgtcgcatcaattaattgatgttgtaaacgctgtttatctttatagactgttaacctatgttggcgacgtgaaatatcagctttatttgtttcaaattctgtaatcatctctacataagaatgatccatttgttgaagctgatgaatcatttgttgttctaaaattgatttagattcaacatcaacaaattgttgtatgctttgttttaattgatcaatgcccttatcttcagcttgcaatgcatttcgacttgatacagcaaaaatgtctgattgtaagtgtacttgtcttaatgcatctgatacatatgtttcaaccgcttcaagatcatcttgactttctgctaaatcagcagcattaattaccattttaaatgcttggttttcattcaactggttcatatctttcatgtgttctataaacgccttgtcattatcagtaaacgaatgattaaaataacttacatacaagattaagtctgaagaagttaaaatttgctcggtttcatttgtatgcctttggttatttgagtgtagccctaatgaatcaacaattattttaccttttaaccaatcatgcattaatgcaatgtgtactgttttaacaaatgttgcgtattcatcttctgcactccactttttcaattcctgttgattaatggcatgtttttctccattttccaacatactgacatacaaattataatgtttttcaactgcatgaacaaaagcgagttgatttttatttaaatgtgattttaacttttctaaatctgaattaataaagtcttctatagttgaaaaagatatatcttggtattcaactactgcattaatttcatctaataattgcgattgtgattttagcgttatataactctcgtctccataagatatttctgtagtagctgctgtagtaggatttggagaactaactaaaatatgctcgcctaataatgcatttatcaaactacttttacccgcactaaacgttccaaatacacctatttttattaatttattatctatacgtgttaatgtttcgtggatatcctgctttgtacgcttgaacaaaggcacatccgaaattatatcaagtgctttttgaatatctatagacatatttgttgtagctgtattctgatttagctgctgattatcacgattatccttagcattatcagtagccacttgatatgttgtctcttgtcgatctactaatttatctagagattcatctaaatgaatatagtaatgacgataattcttagtcgtcaatgactgacgcagctcatttaattctgtataacgttgatattcttttaaatcatcactttcttctgttggtaattcatctgcctgcacattttctattatttctttaaaaattggtgttgattgttgttcaacatatttcttaatggctttaaccacttcgtctgaaaatgtaagtacataagtattgctgattgatgtttgtggttgatataaaccttcaatcatttccggcttaacgtcataatgctgatttaatactttatctgaagcttcttttttattgataaaacgcgtaacaaatgacatatcttctcgcattggttgacgaatttgttgattaacatgttcttgtaacgcatctgtcgctgttaataatcgctgttgttgaatttgaagctttttcttctttttattaaaaaggccaccaacattaaagtcttgagacatactttccaaataacttcgtaacatttctctcatattatgcggcataatgtatgcattttctaaaatatttttacgcttattctttaaaaatgccattaattcatctggattatttaaaagttgcgcctcttcactaattgcttgatgttgttgactatttaaaaatgcttgttcaaactctgcttcttcgatacccaaatcttctagtacttcctgaatttcagactgaatgtaatctagctgagcttcggtaatatattcaaccgttcttgatgtataatcctctattgtttctctatgttgatctaatgaaactagataagttgataatgctccaagttcattttcagagtgatcaaatttcgatacataaaaggtgcgttctaatttaatgtcccaatctgcaattgatttttcaactcgagatttaaacgtagcgaatgacaattcatcgtcttgatgcttgtcaatttgattaatgataaacacaacaggtattccaacatcatttatatgcttcataaacttaaagttaagttcagattgaacgtggttatagtcaaccgtataaaatatcatattacttgtatacatatattgttctgttattgactgatgtgatgcaacatttgaatcaacacctggtgtatcttgcaacgtaaacccattttcaaatttagctgattgaaaattaatttctacagattcaacgtcgacattttggcgattcatttcccttacttcatcataattagataatttggcatacgtttgattcggcaaattagcaataatatcgtgattgtctgaaactgacacgatagcagtattacttgtcgttggtacaggtgaacttggtaagatatcttgttcaattaataaatttatcagtgtcgatttacctgcagaaaaatgtccaacgaacgaacatgtatattgctgcaaatatactttcttaattacttggttaattgtatgtaaaagtgcttcatttcgcgacttttcaacttctttttttaatttatataaaagatctaattgttctttattaatcatgttactttcccctttggttcgttcacatagaaatgcttgcttgttaaaacgaattcatacaatatcgatgtccatttaaacaaaggtcgttgaatggctcgcattgtattatgtttaaattttatcatagctgcttgataaaacatatgaataatcaattttcttcaaacattccaacttaaaagttcatttttctaaaaatcacaaatcattgttaaatttttctagaaaataaatattgtcacagtttgttcacacacgtcacagaattgacaccgtataatagccaattgggagggaaatatgaaaaatacatttaatccattacaaagattacatttctacgcagcaatatttattgctccactgttaatcactttaaccatttcgggcattggttatttgttctttccagaagttgaaaataatatttataagaatgagttttttggtgacagtgatgtcaaaacgcatcaaacattaaatgatgcagtacatcaagttgaacgacaatatgaaggattctttgtaagtaaagttagcatacttgatgaaccatataacaaacgaattacactgagtgatatggcaggaaatcagcgttacgtctttctagatcataacaatcaatttgttgcagatcaaaatgcgaaacatacgtattctaatgtgatgcgaagtatacatagttctttgtttactgaaaatactattattaattatttagttgagttaaccgcatgttggacgatattcatgattttatctggtacttatttactcattaagaagcatttaatttctaacaaaagtaaggcacttcattggcaaaagtggcacgcaatgattggaattatcattgcaattccagtatttgtattagtcttaactggattgccatggtctggttttatgggcagtaaaattgccggtatgatggacacaaacggtgaccttggtcaaggtgaattagcgattaatccacctaaatcagatttgaatgaattaccttgggctacacgtaaaaataaacagccagcttcatccgaaaaaggttcaagtggtcatcatggtaatgcagcaatgcctcaaactaaattagattatcaaatatctattgataaggtcgttgaacaggcgcaaaaatctggtattaaaaagccgttttcaatcgtatatccaagtgataaaattggcacctttattgtatctaatactagtaattcaggtgttactgggctagatgtatctccttacaaggaacaaacactttattttgatcaatatagcggtaaaaagctaggtacgattaaatatgatgactacggtattattgctaaatggtttacgtggggcattccgcttcacgaaggtcatttattcggtattgtaaacaaaatcattaatttatttgtatgtatcgctttattagtagccattggtatgggatttgtctcttggataaatcgtacaaaaaatactgcagtaaaagtaccacatcgcgtaaaaaaaccagcatctatatcactcatcatatgtttaattgtattaggactattaatgccattatttggattatcacttatcctagtatttataattgaattaatattatatattaaagatcgtcgtgctaaacaataatgcacttaaagttttgaactgacgaaatttacaaaatgattctctaattacttaaaacaggttctataataaatcgaactgatggagcttgggagataaatcaatgttctagggtctataatattatattggcagtagttgactgaatgaaaatgcgcttgcaacaagcttttttcaactctagtcaaccttgccggggtgggacaacgaaataaattttgtaaaaatatcatttctgtcccactcccatctgtccgattttttgaatttgaagataaaaaagcatctaaaacgtataagaagattactttacttcttccaaattacgttatagatgctttttattaattcatatgcatgtcgtgaattttcatcattaaaccgtgtgggacgtcatcatgtttaacaatctcttgtttataaaatgtcttcccatcatctttagaaactaattttacaaagtctccttttttcggtttaaaatcatttgatggttctactttgatattatgtttgactaatccatctttttcactgacaactttttctgcatttgtattactattcatataaccaaaataagtcgttttttgactagaaaaaatcattaaacatacaacggcaataccaataacaaccaatgctatagataaacctagacccatttttttacccatttatagactcctccatttttcaaaagtacctattatcatgagaacataattattactagttttagtcacgcattagaaacactttagttttcaatagttttacgttctgtctttttaccccagtattgataataagtacattctatatatccattaaataacttacgtcgcttcgttgctttacgatctactaaatattcaaattctttattacttgttaaaatgtatgtagataaaaatggatgttgtttcattagtttaccaatataacggtacatttcttcaacttcttcacgatcaccaatacgttcaccatatggaggatttccaattaacgcaaccggttcttctgtatcaattgttaatgtattgacatcttttacactaaatttaataatatcagacaaccccacttcttcagcgttacgcttagcaatctctaccatttcaggatcgatatcagaagcatatacttcgatttctttatcataatcagccatcttatccgcttcatcacggtaatcatcataaatatttgctggcatgatgttccattgctctgatacgaactctcgattaaaaccaggtgcgatattttgagcaattaaacaagcttctatagctattgtacccgaaccgcaaaatggatcaattaaaggtgtatcacctttccagtttgcaagacggattaaacttgctgccaacgtttctttaattggtgcttcaccttgtgctaatctataaccacgtctgttcaaaccagaacctgatgtgtcgatagtcaataatacattatcttttaaaatggcaacttcaacggggtatttcgcacctgattcatttaaccaacctttttcgttatatgcgcgacgtaatcgttcaacaatagctttcttagttatcgcctgacaatctggcacactatgtagtgttgatttaacgcttctaccttgaactgggaagttaccttctttatcaataatagattcccaagggagcgctttggtttgttcgaataattcgtcaaatgttgttgcgttaaaacgtccaacaacaattttgattcggtctgctgtgcgcaaccataaatttgcctttacaattgcacttgcgtctccttcaaaaaatatacggccattttcaacatttgtttcatagcctaattcttgaatttccctagcaacaacagcttctaatcccatcggacaaactgcaagtaattgaaacatatatgattctccttttatacaggtattttattcttagcttgtgttttttatacatttccaacaaatttaatcgctgatacattaacgcatttgcttatcattttaaaacaaagcagtgtcattatatcaagataaggcgttaattttaagtgttcttttcatgaaaaaagctctccatcatctaggagagctaaactagtagtgatatttctataagccatgttctgttccatcgtactcatcacgtgcactagtcacactggtactcaggtgataaccatctgtctacaccacttcatttcgcgaagtgtgtctcgtttatacgttgaattccgttaaacaagtgctcctaccaaatttggattgctcactcgaggggtttaccgcgttccaccttttatatttctataaaagctacgtcactgtggcactttcaaattactctatccatatcgaaagacttaggatatttcattgccgtcaaattaatgccttgatttattgtttcatcaagcacgaacactacaatcatctcagactgtgtgagcatggactttcctctatataatatagcgattacccaaaatatcacttttaaaattataacatagtcattattagtaagacagttaaacttttgtatttagtaattatttaccaaatacagctttttctaagtttgaaatacgttttaaaatatctacattatttgaagatgtatttgttgttgtattattcgaagaaaaacttttattgtcctgaggtctagatgttgctacacgtagtcttaattcttctaattcttttttaagtttatgattctcttctgataattttacaacttcattattcatatcggccattttttgataatcagcaataatgtcatctaaaaatgcatctacttcttctcttctatagccacgagccattgttttttcaaaatctttttcataaatatcttttgctgataatttcaatgaaacatctgacattttttccacctcattagaaactttgatcttcagaccactgtaagtcattgatgaatgctgttaattcatcgaacgtcacaatatcacaagtatagtttgttttatccataaaatcaactaacatctgcttgaagaacttaggactcgcctcttgttcctcatcataaatgagcaatgtttgatccgaatgttcaagcataaattgatctgcttgtttaaattgaaaaggaccttgatacgacgtatgaaaaatactatcaacataatctgcatgcttaattatgttggcatacttactttgattatgttcattccacttttctgtatgtccttggaacggtgtaattacagcaaactttaacgaatcatatgttcgttgtaattcaataacaacttctgcagtccataattctatacccatttgcccttgtattaacacccattctaatccttcatccaacagttgttcaattttatgttttataaattgttttaaataatgtacttcaggtgcgtcatctttaaaaatgtttaattcgaatgatttgtaacctgttacataaactgttttaaccataagtaccctctttagttacgccatctaatatattttgtaaatcatattgaacacttttaagcttttcaataaataactttcgacttgttcgcttaaaatgacattcgacagaaagttgttcaatgttagcaatcaatagctcaaatttccttgaattcatataaggtacttctataataaattcacgatgtaatttgatctcattgagcaagctatcaatatgttcagtatatggctttacagtttggtaaaaatcatgatcttgttgttgtgatttcacattttcgaaattttgttgcatgttgttaacttcataaattagtgattcgactacatcattcatgaggacgcctcctacattttttaatttatcacaatatactgtattcgtcatgttttaacactctatataatttgatttaacttattttcaaatgtgttatctgttaaatcaagtaaatctaaaaacttcctatataaatacaaaattttatcgtgtatgttgttatacgatgaaaatacttttaatctaataaaatcatttaaatcaaatacacctctgttgattaacaacacatacttgtacttgcctcaaaaataataattactgatcatgatttgacttttataacaaaattcaaaaatattgtaatgagtattcatttttataagcaaaacttttcaattaattaaaattgtgtgtaaaattccaacattaacggtaaatgtattataatattattgtgttaatgctgaaatcacgttaaaataagctttggtgtattgtgtctttcgcatttatactaatttaagtttggtatttcactataatgttgtgtataataaacaacgtttactaccaaacttgtgtggtgaaatttatgaattatccaaatggtaaaccatatcgtaaaaatagtgctatagacggagggaaaaagaccgctgcctttagtaatattgagtatggtggacgtggtatgtcacttgaaaaagatatcgaacattcaaatgcgttttatcttaaaagcgacattgcagttattcacaaaaagcctacgccagtacaaatagttaatgtcaactatcctaagcggagtaaagctgtgattaacgaagcttattttcgtacaccttcaacaactgattacaacggcgtttatcaaggttattatattgattttgaagcaaaggaaactaaaaacaagacgtcctttcctttaaataatattcatgaccatcaagtcgaacatatgaaaaatgcatatcaacaaaaaggtattgtgtttttaatgattcgttttaaaacgctagatgaagtttatcttttaccctattcaaaattcgaaatattttggaagagatataaagataatattaaaaagtctataacagttgatgaaatacgaaaaaatggttaccatattccttatcagtatcaaccaagattagactatctaaaagcagttgataagttgatattagatgaaagtgaggaccgcgtatgacggaaaacaaaggatcttctcagcctaagaaaaatggtaataatggtgggaaatccaactcaaaaaagaatagaaatgtgaagagaacgattattaagattattggcttcatgattattgcattttttgttgttcttttactaggtatcttattgtttgcttattatgcttggaaagcacctgcttttaccgaagctaaattacaagatccgattcctgcaaagatatatgacaagaacggagaacttgttaaaacattagataatggccaaagacatgagcatgtaaatttaaaagacgtgccgaaatcaatgaaagacgcagtacttgcaactgaagacaatcgtttctacgaacatggcgcacttgattataaacgtttattcggtgcaattggtaagaacttgactggtggatttggttctgaaggtgcctcaacattaacacaacaagttgttaaagatgcatttttatcacaacataaatctattggacgtaaagctcaagaagcttacttatcatatcgtttagaacaagagtatagtaaagatgatatcttccaagtatatctaaataaaatttactattctgatggcgtaacaggtattaaagctgctgctaagtattactttaataaagatttaaaagatttaaacttagcggaagaagcttatttagccggtttacctcaggttccaaacaactataatatttatgatcatccaaaagctgctgaagatcgtaaaaacactgttttatacttaatgcattatcataaacgcattacagataaacagtgggaagatgctaagaaaatcgatttaaaagcgaacttagtaaatcgtactgctgaagaacgtcaaaacattgatacaaatcaagattctgagtataattcatacgttaactttgtaaaatctgaattaatgaataataaagcattcaaagatgaaaatttaggtaatgtattacaaagtggtattaaaatttatacaaacatggataaagatgttcaaaaaacattacaaaatgatgttgataatggtagcttctacaagaataaagaccaacaagttggtgcaacgattcttgatagtaaaactggtggtttagttgctatatctggcggacgtgatttcaaagacgtcgttaacagaaaccaagcaacagatccacaccctactggttcatctttaaaacctttcttagcgtatggacctgccattgaaaatatgaaatgggcaacaaaccatgcgattcaagatgaatcttcatatcaagttgatggatctacatttagaaactatgatacgaagagtcacggtactgtatctatttatgatgctttacgacaaagtttcaatatcccagctttaaaagcttggcaatcagttaagcaaaatgctggtaatgatgcacctaagaaattcgctgccaaacttggcttaaactacgaaggcgatattggtccatctgaagtacttggtggttctgcttcagaattctcaccaacacaattagcatcagcatttgctgcaatcgctaacggtggtacttataacaacgcgcattcaattcaaaaagtagttactcgtgatggtgaaacaatcgaatacgatcatactagccataaagcgatgagtgattacactgcatacatgttagctgagatgctaaaaggtacatttaaaccatatggttctgcatatggccatggtgtatctggagtaaatatgggtgctaagacaggtactggtacttacggtgctgaaacttattcacaatataatttacctgataatgcagcgaaagacgtgtggattaacggctttacacctcaatacactatgtcagtgtggatgggcttcagtaaagttaaacaatatggtgaaaactcatttgtgggacatagccaacaagaatatccacagttcttatatgaaaatgtgatgtcaaaaatttcatctagagatggcgaagactttaaacgtcctagctcagtaagtggtagtatcccatcaatcaatgtttctggtagtcaagataacaacactacaaatcgtagtacacacggtggtagtgacacatcagcaaacagcagtggtactgcacaatcaaataacaatactagatctcaacaatcttgaaacagcggtggattaacaggtatattcaactaatccactcaacataaaaaactcagttataccatatttatggtgtagctgaggtttttttatatgtattcatacgctattgctatattagtagaaaccgtaaaatcagttattcacatacattttgaaacatctaaatagtctttcatattcacatctttagctatgtaaaattattgaaattgcaaaagtggttgtacccatttttaaaattatgattatattttctcatagtcatcttagacgttgttttaaattgatatgtttatcaattccctgagtacgttaatcagtgaaatatcaacatgtttgcaacgtatattcacaatcatagatataagaaatccacctacgattcgaaatagatatcttaaaccatacctcaagatatccattatgatgtagatggacattttttatattaagacgttgtaatgacatgacacctaacataaatacaaatatgtgtgcatgaattagttttacatcttttcaacattaggaaatgatcaaacttgtctatacctgcttattctttaaccttgtttgataactagcattcattttaatcaattcagttttaaaggtcttcatttgtcgatagcccataaaatgatatttacgttcaatcatataatcatatctttctttaaaattcattggcacaacaggatattgatttaaattatcaaaatcaatattgccagttatgtcattaacctgcttaaaataatcaataattttactatggtattcatccaagtaaggttttgcttcactagaacctaatgtcttatttttggcaaatacatcaatcttttgttctaaattatcaaatacctcttttgtaatatttgtcatattatcacgcttctttcaaactagctttataacgtttttgtccttctctacaatcttctaataatggacaaatatcgcatttaggttttcgggctaaacagtggtatcttccaaagaaaatgagttgatgatggctcctattccatctatctctaggtatgacagaacataaacggtcttctacctgtctcacattatctttccaacgattaatacctaagcgtttagaaacacgttctacatgcgtatcaacagctaatgaaggttcatcaaatgctacactcatgactacattagcagttttacgtcctacacctgctaaactttctaattccttatgtgtttgtggtatttctccattaaattgatcaatcaaagattgacaaagtttcttaatattcttagctttgttacgatacagaccgatagaacgaatatcattcataagttcttcatcactgactgccaaataatcttcaggcgttttgtattttttaaacagctcagttgttactctatttactagaacgtctgtacattgcgctgacaataatacagcaatagttaattcgaacggattatcatgttttagttcacattctgcatccggaaacatatttgctataacatcaatcatttctaatgcttttttcttacttaccatcaaggttctccccgtttaaccaatcaaatttaggtaccgttttaactgtgtgcgtcattttcggtttattaaatttttctcttatttttctagaatcgtcaattgttttgacattgtttttcttccaattaagtaaaatacgatccatatatttaaagctaagtttattcaaactattcgcctcgtctaatgccgcttgtataattgcagtatcgtgtttatcaacatcaatccattgatttaacgtctctatttcatatggagataacggccttgcaaatgtatcctctaaaactctaaataattgtttaaatttttctttactattttgctctttcgtttccatactttgttgcttcaatatatgacttaatttttcgaaaaaaggatctagattcatatattcagtaaatctaccttcttcatctttttgaacttgtaattctagcaattcacgttgaatcaaattttgaataaccattgtaatatcacgtggttgcatagttgagcccttctgaagtaattcaattgaaggctgtttgtttgatgtttcggaagcataaatcaatttaagcaaaatgactaaatcttgctcatctaaacctaagtcactgtaatggtctaataattctcttcgtatcactacaggtcttgcttttaattgatatttatccatgttcgtgcccccttttaaatttaaccattacttaatagtataaatcattttctttaattttcgactaaaatgcttaatatatttaactagtagcaaacaaattttaaataacagtatttttttaaaactagattttaacaatgaactttatgtataatcagacgagctatttattttccaaatatagttactaaacaaaagtttgttcatgattaatataagccgttatcattcttcattttccaagcataaatcgcccagctattaatataggctggacgattctttttattatcataatataaattttaagtaacgaccctaaaacttatggatataaacggtttaataatcttgggaatggcgctgtttcacgaacgtgttcaacaccagaaatccatgcgactgtacgctctaaacctaaaccaaatccacagtgtggtacactaccataacgacgtaagtctaagtagtaactatatgcttcttcgtctaatccatgttctttaacgcgttgttctaacaattctaagtcatccacacgttcagaaccacctataatttcaccgtatccttcaggtgcaattaagtctgcacataatacagtttcttcattctcaggatttggttgcatatagaaaggcttaattttagttggataattagtaataaataccggtaaatcataatgattagcaatggctgtttcatgtggcgcaccaaaatcttcgccccattcaatatcatcaaagccttctgctttcaagaactcaattgcatcatcatatgaaattctagggaatggtgtcgcaactttttcaagttttgatgtatcacgctctaacattttcaactctagtttacaattttctaaaactgattttactacatgtgttacatattgttcttgaatttctaaactttcagcatgatttgtgaaagccatttccccttcaatcatccagaactcgatcaagtgtctacgtgtttttgatttttcagctctgaaagttggaccaaatgaaaatacttttccgtgtgccattgccgcagcttctaagtataactgaccactttgagataaaaacgcatcttgatcaaagtatttagtatggaataattcacttgtaccttctggtgcacttgctgtcaaaattggtggatcaacctttgtaaatccatctttgttgaaaaattcatacgttgcacgaataacttcatttctaattttcattacagcatgttgttttttagaacgtaaccataaatgacggtgatccattaagaattctgtaccatgatttttaggtgtaatcggatagtcatgcgcttctgaaataacttcaattgatttcacttgcatttcgtatcctaagtcagaacgattatcttctgtaattgtgcctgtaacatatagagatgattcttgagtaatttctttcgcaagtttgaatacctcttcatcaacttctgatttaactactacgccttgcataaagcctgttccatcacgtaattgtaaaaaggcgattttaccacttgaacgtttatttgttagccaagcaccaattgtaacgtcttggtttaaatgatctttcgcttgtttaatcgttgttttcataaccattctcctatttattttttcgttatacaatactcattcattttaacaaaatccgctttcaagttctagaactagactaaaagataacgtgtaaatggtaatgatttaagcacagatttgaacattaatttatattaagacaatacaatcatcagtttcagacaaaatatataataaagcctcaatattattagtatgaaggtcgttttttgtgctaacattcaagtttaattataaaactcaaattttgacgaccaaacaaaaattcttgtaacagaacatagcacatgtcatgtcacaagaattttactttgtattttactttttctttttttgaatttgtcttaataattttccaaactgttgaatgtcgccttttttctgacgataattttcaagtgtttgttcaaaaaagtttttataattactgtttatgagtcgatcatcaaatgaaactattatgccgcgatcattttcatttctaattaatcttccaagtccttgtctaaaacgtgtaactgcatcaggtaatacatattccttgaaagttgaagtgaattcagaatccataagccaatattttgcattatgcttgttcataaacggtaacttcgctatcatcacacatttaataccatttgcttgaaaatcaaagccttcaaaaaatgttgacgtaccaagcagtatggctttatcaaaattattaaactgttgtactattttataattttggttctgctgttgtgttaatacaacataatcttcaaattctggcaattcatttagcatatcttgtaccatatgcatcattttataactcgtaaataagactaaacattttgatgacgttatagtcgtatattcaataatatagcttacaatcgatgctacatactcatctatatttttatattgataagatgctacatcactcggtataaatacacttgtattttttgcactttgtaacgatgtgttaacttcaaatgtattaaagtgaacatctttgttgaataactgtttgaaagcatcaaacgaatgattaaattttaaagtaccagatataaaaataagtgatttaaatttttccaatacttgtttcgttaatacatcttttacagcgtaatctttcacatataaacgtattgttgatttttgagatagatttttaattgaaatgaaactagtatgtccagcttttaaactttgttcgatatttttaaatttatcttttaaatacaacaactgtttccgtaatgatttaactgttttatgactaatgccattgaatatttctagcgtcttatttaacttatcgataatcgcatgtaaatccttcaaaatgtcttttgtttcaaaagtaaatacattatggaagcgatgaatatcatcatcataaacatcagaatcattgataatcgtaaatatcgttgagaacaattgctcatttaactcatgaatctcattcatactagccttcaagccaaaaatatcaattggtgcaatatctaatttttccaaaatccgctgcttttccagttgatcaattgcctttaacaatttttcattttcgtttttaccaatcaaaccaagctgatatttaatatcagcataactcaactcatttgtcacttgatttaaggcatagtctggtaagcgatgtgcttcatccactatacaatcatcaaacaattgatatattgaattttcaacatcagaatgaattaaatgtgcatgatttgtaataccaatttgaatgttctgtgcatttcgcttaataaaattataataatgaacatcgtgacgtgccggtacatatgtttcaattttctggtcaaaatacatcttttgaccaccttttaaatttaattcctgtatatctccggacggcgtctctgtaatccaaatcagcaattgcattttcaagatattcacttcgtaattacttgtgtcatcttttaaaatttgactaataagtcccaatgaaatgtaatcacttttacttttaatcaatagtgcattaattttaaaattcaacgcttcattcattgctggaatatctttttctaacaattgactttgcagtaatttagtattggtagaaatcatgacatgcttcccagtttcaatattatacatcaaggccgcaagtaaatatgctaatgatttaccactgcctagtgatgcttcaatcattgctttttcactatgcatgagctgatctaatatagtttccgctaaatataattgttgcggtcgatatgttaagccaagttgatctacagctttgctatataaagacttcaagctgccattataatttgttgtcggctttttaaaatcaacttgcttacgatatattatctgttcgaacttttcgtacgatttatccaatggctttgcatcatattgcctaaccatctcaaagaaaatatcatacaaatcgtatttcaactgtttacttaaataatataattgctttaaagtatctaacggtaacttttcaaatttttcaaaagctaatatcatcaatttagcagtagtagcggcatcttcgtcagctcgatgggcatttgctaaggtaataccatgtgcctccgctaattcacttaattgataacttttatctgtaggaaaagctattttaaagatttctagtgtatctataacttttttgggacgatattgaatattacaatctttaaatgcctttttaataaaatttaaatcaaaatctacattatgagcgacaaaaatgcaatcttttatcttatcgtagatttcttctgcaacttggttaaaatatggcgcttgttgtagcatattttcttcaatggatgttaacgcttgaatgaaaggcggaatctctaaatttgttctaatcatagaatgatatgtatcaataatttggttattgcgcacaaacgttataccaatttgaatgatatcgtcaaaatctaattggttgcctgttgtttccaaatccacaacggcataggttgccatacccatagctatctctccttgctttagtgttaaaaatctatatctgcactaattaaacggtgtgattcacccgcttcatctctaacaattagatagccatcgtaatctaaatcaattgcttgtcctttaaactgtttatcattttctgtaaatagcaacgttctattccagatattagaagctgcaatatattcttcacgaatttcagaaaaaggtaacgttaaaaattgattatatcttttttcaatttcttgaagtaatctctctaaaaattgatatctatctaatttatttttatcatgtaattgtatacttgttgctctatatctaatactttcatcaaagtcttctagttgttgcgtcaaattaatacctataccacatattattgcttctataccatcattattagcaaccatttcagttaagaaaccacacactttaccattatcaatatatatatcattcggccatttcactttgacttcatcttgactaaaatgttgaatcgcatctcttatccctaatgcaataaataaattaaatttagatatcattgagaatgcaacgttaggtcttaatacaacagacatccatagtccttgcccttttgaagaactccaatgtctattaaatcgcccgcgacctttcgtttgttcatcactcaagataaaaaatgaagattgatttccaacaagtgactttttcgcagcaagttgtgtagaatctattgaatcgtatacttcactaaaatcaaacaaagcagaactttttgtgtattggtctattataccttgataccaaatatctgggagttgttgtaataaatgtcctttatgatttactgaatctattttacatccctctaactttaattggtcaatcactttttttactgcagtgcgcgatatattaagtgattccgcaatgctttgtccagatatataattcggtttatttttatagagtaattgaagtacatcttgactatattttgacatgattatccacccatttcaaaatttcagtttcttcgttgcttactttaccagttacaatcgctatctcaatttgtcttagcagatcttttaaccacggaccacttttagcatttaaatgtgccataagtacaccgccattaaccatcatgtcttttctattatgcataggtaaacgatgtaatgtttcatcaatcgtttgaaggttaacgattaatggttcatgtccttgaatatcatttgcctttaacacgtctgctgcaaccattacatttttaatgagattcgtatcataatcataaacaaacatttttaattgttcttttgtaataatacttggtaatgcattcataatttgaatatattgattgatatcttttacttgtcggttacttagctttaaaggcttcaatgagtaattaatatcaaatttaactgatactatagcaatcaacaattctaaatcaattggttcagtcacattaatttgattcatatcaagatgttcgaaatatggcatataattaaatgctttcagcgattttaaatgattaaaactcttttcaacattaatacctcgcattaatttagttagttcaatcactatacgctcaattgataaaaatttaatatctgccatttgtgtacgcatcgcttcgaatgtttccgttgcaatatcaaatgataattgtgactggaatcttaaacatcgaatcatacgtaaagcatcttcttggaatcgttcctcagctatacctacagttcttattattcgattattaatatcttgttgaccatcaaaataatcatacaatttgtttgctgtatccattgctatcgcattcatcgtgaaatctcttcgttgcaaatcttcgtataaatcacgaacaaatgtaacaccacttggtctacggtgatcgacataatcttcttcagcccggaatgttgtcacctcataattttcatcattaaaaactacatttatggtgccatgttctttacctacaggtatcgtatgactaaagatagattctatttcatctggcgttgcacttgttgtgatatctatatcatgaatatttcttcccatgacataatctcttacagagccacctacataatatgcttcaaaaccattgtcttgaatttgttctaatataggccttgcctgttcaaataatgatttatccatattattactcgcctttacttttgttatgctcatttagcattttttgatagtaatactcatattgatctgtaatgagttctgatccaaaacgttcagcaatatctgctagcatgtttttctgaagtttgttgtataacaccttgtcttcaagtaatcggatagcatagtcactcgctgaatcactatcacccacatctacgacaaatccagtttcaccatgtttaataacctctttaattccaccggcatttgaaccaattggaacgacgcctgttttcatagcctcaagtaaagttagtccaaagctttctttttcacttaataataatactaagtcagataattggtaaaattcacttacgcaatcttgtttccctaaaaataaaacatcttcttctacgtttaactctttcgtcttttgacgcattggcactaattcaggaccatcaccaagtaaaattaatttactaggtatcttttcacgtacttttgcaaatgtttctataatagtatctatgcgttttacttgtctaaaattcgatacatgtattaacactttttcatctggtgctataccaaattgtgattttaatgctgtgttatgtttagttggaaactcattttcacgtacaaaattataaatcggtataatttctttgttagtttcgataatttcatgtgtttcttgcgctaaagatttactcacacttgtcacaatatcacttttttcaatgccaaatttaattgcaccttggagtgaatgatcatagcccaaaacagtaatatcagtaccgtgtagcgttgtcataatttttatatctttacctgacatctcacgagctaaaatcccacaaattgcatgaggtacagcatagtgcatatgcaacaaatcaagatcatattctttaataacttcagcgattttagtacttaacgtaatatcatacggtggatactgaaaaactgcatattgattcacttcaacttgatgaaaaatcatattcggtaatggttttcttattctaaacgggatatttgaagtgataaaatgtacttcgtgacctcgctctgctaatttaattcctaattctgtggcaataattccagagccacccatggacgggtaacatgttatacctatcttcattcgcttgcccatcctttctttctatttctctttctattattctcgatgcgtagataattgtttaaatttaagtttatagtaatgttgagtttataatttcaaatatctaaaaaacaggtgttgtatatataatcatttatctagttatacttactttaaaaataatatgatttcatgcgatgcaattcattagtctatgtttttaatcttaatcaaatccaaataaagcatatatttttatattcactttcttttgaatcgatttttatctcttgtattaaacttttccattgtttcattaaagctctctgtcatatctattcccattgaattcgctaaacataacaacacaaataaattatcacctaattctgctttaatcgtatttgcttcctctgaatctttcttctttttttcaccataggtatgatttatttcacgtgcaagttcgcccacttcttcagtcaatctagctaagttagctaatggtgaaaaatatcctgttttaaattgtccaatatattcatcaacttcacgttgcatttctaccattgatttcatttctacgttctccttatattgcatttctaatatagtatatatcaatttgaagtctcatgcatgtttagtgcaatctactgactctagctaaactagatgacaagttgttttttttagtagtttaataattcagtttatataaatgtaatgcattcctaactaaattaaatcaattgaaattgagattataactttatgattcgtaccactacaataaaataatatattgaataatctaccattagaaaaataagcacaaaaaaactagcaaccacacaaaatgtgattagctagttaataagtgtctaatttaagttaattgttaatctataagattaatcacttgaacgcgcaatcaaaataatacgtacaagctctgctacagcgacagcagttgctgctacataagtcattgctgctgcagataatactttacgcgcatgtttgtattccttttcatttacaatgttcaatgccgtaatttgtttcatcgctcttgaactcgcatcaaactcaactggtaacgtaacaattgagaataataccgctaatgacattaaaccagcaccaatccataaagcagttgaaccaaatgcactacctatcgctgttaagataatacctaacatgatgatcatataacttaatgaactccctaggtttgcaacaggtactaatgctgctctgaatcttaagaaccaatatccttggtgatcttgaatggcatgaccaacttcgtgggctgcaattgcagttccagcaactgatggtctgtcatagtttgcaggagatagtgaaacaactttctttttaggatcgtaatgatctgttaagaatccttcacctttaacaacttcgacatcataaataccgtttgcatgtaaaatctctaatgcaacttcacgacccgttttaccactagttgatctaacttgtgaatatttctcatagttagatttaactttgtgttgtgcccataaaggaagcaccattaatattacgaaataaattatcatagtaaaaattgaagacaataaactcactctcctttataaatattttactgtcatttgcagtttttatcaaatcatttacactttaataatttgtttaattcaatataaagcaaaagtccaaaaacactcagacaacatgataatacaccaatttgccacacatgtgtagttataaaatcataatatggaaattgaaggtgaaaatagtcaatataatcattcaaaaatacccaagtcatcgctacactaattccaatcatagaacgtttaaacctaggatagaagtaaattgcctgaacagccattatactatgggaaaacattaataccaggccatttactgtaatatcaccttgctcaataataaataatatattcataataactgcccaaatcccatatttgaataatgttacaaatgccagtgcatcgataatactattttgtttttgtattaatatcaatgagattgaaataactaagaataatattgcagttgggctatctggaacaaaaatcttaaactgccacggcgtatgacttaattgttcaccataccatatataaccataaatcatccctaatatattacaaatgagtagcatcattagccaagaacgttgataaagagtatattgccaaagtttattaatcgtcatctgctaagtcctcaaattgattatgtttatttactagcttgagtgtatttaaaatttgcgttagttgataaaaacgttgcttttcattcatctgtaaacttaaatcaatattatgtagcaagtaatctattaataacgcatgtttatgccgatctatagccatactatttaaatcatgaagataagtttgatagctgggcgattccgttagttgagcaactattaaatcatctagcctttgctcacgctttgacacgtttgcgaagtgaatttgaatatcaaaagcaccgttatgattagcgatataatcaaatatttcatttgtattcattaactttatattatgcttagtaaattgaattgcagaagcgtgacttcccacttctgcaatttctaatgtttcatgatgattaatttttgtatctacaaaatgaatgtttgccaatttcgcctcattcacttttatatagttaagcacccaaactgcaatacgcgacttaaatcgatattgaaaaagtaaatattcaataaaactttctttaatttgattgagtgtctctgacatcaaataccccattttaagattgtaatcttgataattcgtcatgccaattttcgttacttggttctagttccaacaattgatttaaaatagtaattgcttgttccatttgaccaatttcaattaaatagaaataataatcactcataaaatcaatatttgttttcatagttggatatgctaattcaaagaaatgttgagcttctttatctcgctcttcttgaccataggcgaacgctaaatgccagatgaatgtaggatccaaatcttcttcatctacatatgttaataattcaatgattgcttcataatcttcttcattacgatataaatcgcttaaaatcaataatggttcttggtaagcattatcaacctctaatgcttgttttaacaataatacaccttcattagcatcgccgtgttctatttccaaacatccagttgtatacattaactctttataaaattgacttagtcgtaatccctctttacccgtttcaatggcatctggataatttttttcattttcatataatgattgtaaatacaagtagccttgaatataatcaggatctttagaaagtaatgtagtcattattttaattgcttcttgagtgatgtcatttttatcgtaagaaatggcttttttgagataatcttctgaagtcatttcatcttcattaatttcatcgtataagcgaatcgcatcactatagttaccactttgtaagctacaatctgccatacgagagaataagtttacaccattaacttgatattcaccagtttctaaaacagtttcgtattcagaggtagcacgtaaatattgaccatcataatataacatttcagccaacgcaaaatggattattggatcatttggctctagttcaagtgcttcttgtaatttatcaatagcaacttccatcatattaatttgttgatataaatctgcttctaacatcaacttttcaggtgatggttcaacataacttaaatattctaacgcttcgtcagtttgattttcagacattaaaccttcaataaaataaatcagcaattcactttcgtctggatatttgtgatataacacgcggaatacttctaaaccttgtggcattaatccaaaattgtaaagtgtctctcctagaataaataatgcgtcatcgttgtcagtagttattgcttcattaacacgagagtctaaattttctagtttttgtagattgatatcgtctattaatttatagatatcttccattttatattatccctcattttctaaaagctttagttttggtaaaaatcctggaaatgatacatttacagcatcaaattgtttgattttgacaggttcgcttgaaagtagagaagcaactgcaagcatcattcctattcgatgatccgttaaactatccactgttgcatttgttttaaattctgacggatgaataatcaatccatcattagttggttgtaattcaaaccctaacaagtttaacatatcagccgttgtatcaattctatttgtttcttttacttttaattcctcggcatctttaattgtactcgtgccaactgcttgtgtacaaagtaatgctattacaggcagttcatcaattgcttttggcactaattctccttcgatttttattggttgaagcattggtgtgtattgaatacgaatagaagcagtaggttcagcaccagttgtttgattgaaaagttgaatattaccgcccattttttcaacaatatcaataatacctgaacgtgttggattgattccaacattatgaattgttacatcacttcctggtgtgataagtgctgcaacaataaagaacgctgcagatgaaatatcgccaggaacatgaaaatctgcaggtttaatgtatcgaattgcttcagggattgtagtaattgataacccttctgcttcaattggaatattaaaatgtctgaacatcgtctcagtatgatttcgacttacatctaattctttaatgatggtcgcttccttagaaaatagacttgcgaataagatggcacttttcacttgtgcacttgccacttccatcttgtaattaatacctttaattacagatggtttaatgattaatggggtgtaattgtcttcaattccttcaatatttgcattcatactttttaacggtcttaaaacacgatccatcggccttttacctatggaaacatcgccagacaaaacactttcaatacctaaaccacttaacaaaccagctaacaatcgagtcgttgtgccagagtttccagtatataaaacttgatgaggtgttttaaaagctttatatccaggtgaattcacaaccaatttatcttcatcttctttaatatctacgcctaataatcggaatatatccattgtacgacgacaatcttcaccaagtagtggcttatatatagtagatacaccttcagctagcgacgccaacatgattgcacggtgtgtcattgatttatcgcccggcacttctatttcgccctttaacggacctgaaatatcaatgatttgttcatttaccatttcattcacctacttaaaatatgtttttaattgttcacatgcatgttgtaatgttagttgatcaacatgttgtacaacgatatctccaaattgtctaatcaagaccatttgtacaccttgcttatcattctttttatcacttagcatatattggtataacgtttcaaaatccaagtcagttatcatgtctaaaggatagccaagttgtattaaatattgaatataatgattaatatcatgcttagaatcaaataaagcattcgcaactataaattgatagataatgccaaccatcactgcatgaccatgtggtattttatgatagtattcaacagcatgcccaaatgtatgacctaaatttaaaaatttacgtacaccttgttctttttcatctgcaacaacaatatctagcttcgtttcaatacctttagcaatatatttatccataccttttaatgactgtaatatctctctatctttaaagtgctgttcgatatcttgcgtcgctgattcaccattcaataacgcatgcttataaacttctgcatagccacttaatatttgctcaaatggtaacgtctttaaaaagtctaaatcataaataacagcagttggacgataaaatgcaccgataaggtttttaccttgctttgagttaatacccactttaccgccaacactagaatcatgcgccaaaatcgttgtgggaacttgtataaaatggacacctcttaatagtgttgctgctacaaatcctgcaaaatctcctgtcgcaccaccaccaacagctataatcgctgtattacgtgttacatgatgagacaaaatgtattctaatgtttcttgatattgctcaaatgttttcgtcttttcaccagctggaataatgactttatgcacattttcatatgataaaatatcattaaatttatcagcaaaatattgatttacatgctcgtcaattaatataaaactttgatcaaactgatcaatatacgtgctaatatggtcaattgcaccatgttcaacaaatattggataattgtttgaaggataggttgtttgtaatttcatgatcacacctcaattgttctcgttgttaaaactcaacatttaattgtctgcggtcagcaatttgttgttgaagttgttcaatatggtttgattgaaactcttcaagtaatgctttcgctatttcaaatgcaacaacgtgttcacacactatacttgctgcaggtacagcacaactatcagaacgttcaattgttgccttaaagtcttctttagtatttatatcaactgaatttaatggtttatataacgtaggaataggtttcattacaccatttacaataattggcattccatttgacataccgccttctaaaccacctaagtgatttgacccacgataatagcccaattcagtattgtagagaatttcgtcttgaatttcgctaccaggcttttcagctgctttaaatccttctccaaaacttacacctttaaatgcattaatactaacaacaccctgtgctattcttccatctaatttacgatcataatgtacataactacctacaccaacaggcatattttcaactacaacttgaactacgccccctattgaatcaccatcgtttttcgcttcatcaattttatcgcgcattgcttgtgcgatgccatcatcaattacacggacgtcatttcgatcaaggtttgctttaaatgtttctgaatcataaaaatctttatctttaatgccacctatctcaacaacacgactgtatatttcgatatctaattgttctaataaaactttgcatagtgcaccgaccgctacacgtgctgctgtttctctggcagatgaacgttctaatacatttcgtaagtcacgatgattatatttcataccgccaactaaatctgcatgtcccggtcttggcttcgtaattgtacgtttcatattttctcgttcttcatcgcttattggcgcagcgcccataatttttcgccaatgtgtaaaatcatcattagtaacaaccattgtaatagggctacctaatgtataaccatttcttacacccgaaacaatctccactgtatctttttcaatttgcatacgacgtccacgtccgtaaccgccttgacgcttaaacatttctttattaatatcctcaaccttaatttctaaatttgcaggtacaccttcaacaataactgttaattgaggtccatgtgattctcctgatgttaggtatctcatacacactcgctcctttcatacttccacgataacattataatatgttgttaatcttatcatattcattgtgcattcataaatgtttgttttcaagctcaattaagaaattgatttatatctctttttaaatgtcagaattatcttaatattaaacgaactaagattcattataatatattcacaacgagaaaagtattatgaatttctaatattgttagattgtttaaacaaccatttgaaaatttaaaatttattcgaacaacttataccgcatataatcgtagctaaccacgaataaataatatacaagctatatttctttatataaaagaaaatggactgatcattttttataaagttaatcagtccgtataaaaatagggttttgttatgaatggtcataaatcactaaccacataacaaaaccctttttccttttattaatcataaaggtttatagcttatattttattcatataaccatgcatcacgtggtgaagcatagctagtaatttcattttcattaaaccataaattaatttcacgttcagcagactctaatgaatctgaaccgtgaatgatatttctaccaacagttaaacctaaatcacctctaattgatcctggtgaagcttctgaaggattggtgctgccaataatatgtctagatacattaactgcatcttcaccttcaactaccattgcgaacactggtgctgatgtaataaatgaaattaaatcattataaaatggtttaccttggtgttcaccataatgtgtttcagcaagttccattggtacttgcattaatttaccaccgacaagttttagtccttttcgttcaattcttgaaattacttcaccaattagatttctttgtactgcgtctggtttaatcattaaaaatgtacgttccactttatgtatccccctgtgtttaataggtttatgtatattactattatatattaacaggttggtaaagcgctttcaatacttttcataaatactatgtgtttcttgaccccatttttttcgtcaaacttaaaagtagtgatttcggatgtccatctggtaactcagaaatcaaattcaaagctttacttaaatacttcgaacttacttccttagcctcatcgatgctgtcagattttctaatgatttggatacattcttcaaattctttgcgttcactatcacgacgtaattgttcgattttcaatttgaagtctggatttttacgcatttctaataaaatcggtaacgtaatatgaccattaagcaaatcacttccgaccggcttacctaatttcttttcggtacttgtgaagtctaatacatcatcaatgatttggaagctcatacctatataatgaccaatcattttcaattttcgtacagtttctttatcagattgagatgtaattgcaccaacttcagttgataattgaattaacagtgctgttttgcgattgatacgtcgtaaataattgataattgtctgttgactgttaaattggtcttgaaattggaaaagttcccctctacaaacatcaacgatagattcagatattaattgatgtacacgattatctttaactgccattaagtgttcaagtcctaatgccaataaaaaattcccagttaaaatagcagttgtctgatcccatttctttgatatggttaacttgcctcgacgcttgtcgcttttatcaataacgtcatcatgaacaagtgttgccatatgaattaactctaatgcgactgcaacttgatacgtttgttcagacgtttgttcatctttgccaaattggctactcagaattacaaatgctgggcgtactcttttaccaccagaagacaataagtgtaatgatgcctgttctaatacagaatctttactttttattgccttttcaagtcgttgttccactttcttaatttcattgttcatgtttaactttgccacgttaatcacctttggtattatctttttctttatagccaaggtgcattgcagcaacgccccctgtaaaactacgtactcttacatttatgaaatccgcttcttcaaacatgcgcttcaactcttcttttccaggaaaattaaacgtagattgctgtaaccattcatattcttcttttgattttgcaaataattttccaaaaataggcataacaaatttaaagtataatgcatacatttgtttaaagactggcaaagttggttggctcgtttcaagacataccaccataccacctggtttaagtactctattcatttcttttaacgcgactaaatagtctggcacatttcttaatccaaacccaattgttacataatcaaaagaattgtcttcaaacggcaattccattgcatcaccatgaacaagtttaacattttccattgaagcagttttttcttttcctacttctaacatattctcactaaagtcaatgccagtaacttctcctgttgatcctacagctttgcttaatgctattgtccaatcaccagtaccacaacaaacatctaatgctttcgtaccttttctaacacccatgtctttcatgacacgttttctccatactttatgctgctcaaaactaataatattatttaatctgtcatatttttttgaaatattttgaaaaacgcgatgtacttgctctttatttgctttattgtcagccatgcttaattacctctactttttaaataacttttttggatatcgtgtaagtaatgctttacttcactttgattatatttcttgaagtatgatggatagtaatcagacatatcttcaaataaataattatatatttccgactcatcaatattgataccgaaatgagataacgtaatatatgggaaaagtgtttcaatttttactattgcttgagaaatttcataatcatttaaagcttgatgatgtaatgaagatttcaattcattaatttcaacaattgctttactaatttcattttgaaatgataaatcattgatttctgctagtagcgtataaaaatgtgcactaattaaatctccaatcaaaatggaatgtttagacaaatgattatatgtaatgtcatcaaggtgtctcattgatgtgtcaattgtgaggcatgctactttggcaacatctggaatatcatatgaatcaagcaacttacctaaccgatgattaatattaatggattcatattctgatacaccctttaatctttcttctatttgtctttccaatttgctaacagttgtttccatgtctacacctcacgatattatcactattcatattaacattatatgtaagaaattaaaatcttttgaagcattaagattacttatcatttttaaatttcaatttaaactaacggtaatttatgtagcttttgtaattctcataataacccttacttcatttacattattcatctttttaaataacgtaaaatactatagtagacatggttaccttttaagtaaactcaacgctaacaattaatctcattattcatatgtatattttgtagttgctatttttatcaaaactattatgtcatgtaatattttgaacgcttaaacaatgaatgttccaaagattaaaaacttagaagaacattacaatttatgtacaggttgtaagtattaaaagcaaaataaaaagcccttattcagggctttttaagtaaaattattttacagcatcttttaatgctttaccagctttgaatgctggaactttacttgctgggatatcaatttctttaccagtttgagggttacgacctttacgtgcagcacgttcacgtacctcaaagttaccgaaaccaattaattgtactttttcacctttagcaagtgagttttggattgattcgaatacagcatctactgctgaaccagcttcttttttagttaaatcagcttgctctgcaactgcattgattaaatctgttttgttcattagacattcacctcctgaggtttgataatgatatgtttatatcattatggtaaaactttaacacaagcattacataaatcgcaatcatttatgtggcaaaaacgttgaatttaagccatttctattcattttacgtaattattagctgtatatgtgtaataatacacattttattcagattttttatcgcgctccattaaatcttttacgcattcttttactgagatattttcaaataatactctatataatgcatttgtaattggcatatccacatttttttctttagctaaatgataaacggatttagttgtataaataccttcaacaaccatattcatttcagataatgcttgatccatcgattcaccttgtccaagcttatatcctaatgtgaaatttcgagaatgtgttgatgtgcaagtaacgattaagtcaccgataccacctaaacctagaaatgtcataggatcggcacctaacttttcacctaatctgctaatttccgctaagccacgagtcattaatgcagcttttgcattatcaccgtagccaattccagctacgataccacttgctactgcgatgatatttttcaatgcaccaccaagttcaacaccaaccaagtcatcattcgtgtacacacgcaaataatcattcataaataaatcttgcgttaatttacttacatttttatcttttgatgatgcagcaactgtagttggttgcttgactacaacttcttccgcatgacttggccctgacaacacgccaatacctgcattatattcaggtgaaatagaatcttcaatcatttctgacacacgtttaaatgtcccattttcaatacctttagcaacatgtataaaagtctttttagatgtcagcttatcattaatttgagtagcaacttctcgcattgctttagtaggtaaagccattaagtaaatatctgcatattgaattgctttggtcatatctgaagtagcgatgatgttaacatctaatttcgcgtattttaaatactttttatttgtatgacatgtatttaattcatcaacagcttcttgatttttaccccacatcaaaacatcatgtccattttctgcaagaacattggcaagggctgtcccaaaacttcccataccaaaaacggtaattttagtcattgttatcccccaatcgttaatttctctttcgagctataatatgaattggtgtaccttcaaaaccaaaagcggcacggatttgattctctaaatagcgtttataagaaaaatgcattaattctacatcattaacaaatacaacaaatgtcggtggttctatagcaacttgtgttgcataaaagacattcaaacgtctacctttgtctgttggtgtagggttcatggaaattgcatcagtaacgacttcatttaaagttgaactttgaacacgttttttatggttttcacttgcttcattaatgtaagggaataatgtacgtaatcttgtgcgttctttagcagacacaaaagcaatttgtgcataatctaaaaattggaattctttacgtacttcatcttcaaatttcttcatcgttttactatctttttccacagtatcccatttatttacgacaatcacgactgctttaccttgttcatgtgcatatcctgcaacacgtttatcttgttcaataatgccttgttctgcatcaatgaccactaaaacaacatttgaacgttcaatcgcttttaaagctcttaatactgaatatttctcagttgattcatatacttttccttttttacgcataccagcagtatcgattaaaacataatcttgtccatcataactatactctgtatcaatagcgtctctcgttgtccctgcaacattagaaacgataacgcgatcttcacctaaaatagcatttactaaacttgatttacctacgtttggtcgtccaataatggatagtcgaattgtatcttcatcataaggatcttcttcctcttcaccaaaatgagaaacaactgcatctaacaagtcaccaagacctaaaccatgtgaccctgatatcggatacggttcaccaaatcctaatgaatagaaatcatacacgtctgtacgcatttccatattatctactttgttaaccgctaatacgaccggttttttagatttgtataaaatttgagcgaccatttcatcgctttgtgtcaatccttcacgcacgttaaccataaaaataataacatccgcttcatctatggcgatttctgcctgcgctctaatttgtgtttggaatggtgcatcaccaatttcaataccacctgtatcaataatattgaaatcatgtgttaaccactcacctgaagaataaatacgatctcgtgttacacctggcgtatcttcaacaatcgaaacacgttctccaactattctattaaaaattgtagatttacctacattaggcctacctacaatagctactataggtttagtcataagctaacttcctctctttcttatatctttttaataatatcacatgagactgtgtattcaaaatgagtttattactgtaatgataaaaatcagcacttaaaactttatcttaaaaaacacttagttaaatttgtccacgttatcattccggatatattttgttacataaaaatactccacatgcaatcataaacatgtggagttgactattaaatattaaattatagtttaagatttttaagtttatcaccaatcatatcgccaattgttggattatcttcttcttcgctttctaagtacgccttagtcgtagaaggatcactttcaacaacatcttcgtttggtaatgttgctttaatagatagtgatactctttcattctcttcatcaatacctaatattttaacatttacttgttgaccaggttctaatacttcacctggcgtaccaatgtgtttgtgtgcaatttcagaaatatgtacaagcccttgtacacctggtgcaatttcaacaaatgcaccaaagtttgccaatcttactacgacaccttcaatgtcatcattttcgtggaattgacctttaatattttcgaaaggtgttggtaacgtatctttgattgataatgaaatacgttctgtatctctatcaatagatttaattttaactttaacatcttgaccaattgaaactacttcttctggtgtttgaacatgttcgtgagaaagttcagatacatgcactaaaccatcgacaccgccaatgtctataaatgcaccaaattgagttaaacgcgctactttaccatcaataacatcgccttcatttaaagattgtaataattgatcttttttagcatcgttttcttcttgttcaactgctttacggcttaaaatgactctattattttcaggatccaattcttcaactttaatacgaattgtttgtccatcaaacacagagaaatcctcaatgaagtctgttgaaattagtgaagccggaacaaaacctctttgtcctacatcaacaaccaaaccacctttaactacttctgttactttcgcttcgatgatttcattattatctaatttttcttgtaaataactataagacttctcagtttcaagttgtcttctagataagatgtaagctccagtttcattttcttcatcaaactcaactttagtgacatatgcttcaacttcgtcgccctcttttacaacttcacttgggctatcaatatgatgcgtagatagttgactaataggaataatcccattaaatttaccaccgttgatatgaacaacaacttgcttgtcttcaacttgttgtacctcgccagtgactttgtcaccttctttaatatcgttaatcattgattcattgaattcttcagtcatcttgtttgcctccttatacactacatatttataacatcttataaactgacagaattgtcaagaaattctacctttattacatttagtaaattagtcgtatccataaatatgtcacttaatctcattctgtgtattagttggacatatatttattacaaccatatattcaaacaagtaataaagtccgctatgtttatacatattttttgtataaaaattagcatagctcactattttgttttataagtctgtcatttcattgttctctacaagatatattatagtaaaattttatacttttataaaacaaaaagccacgcaaataagcaacttttacatttgaatagtaagaagaccgtatatagtgcatctttctcgaattattacataggacattttttgtgactagatcagcttcttttgcaattcttagatttgtaacactcattttcttatcatttgtaaaatgctttatgaatttaatgaattatttttggaattctaataatttacctttattatttctgttaactttttgaaaaacatacacacttgactgacgcattaacttttaccaaaagtaaaaaggcaactttcattcatcgttgaataaaaatcaccttttaagttgagtaaatcattatcagcacattcaatttgtatatgcattaagcgttgcacattacaaatagatatttatgacttactagattatttaatttgactcaccatcgctaaaatttcgtcagtaacttcttcaatcgtcttgcctgtcgtatctaatgtcactgcatcatctgcttttcttaatggtgatatttcacggttcatgtcatattgatcacgtgcttcaatatcacgttttaaatcttcaaaatttgattcgattcctcttaattgattatctttatatcttctttctgctcgctcttcaactgatgcaatcatatatacttttaaatctgcatctggtagcactacagttccgatatcgcgaccatccattacgatacctttttctgcagctaactctttttgttttttaacggcgaatgaacgtactggctctttagatgcaacgtatgaaacatgttgcgtcacatcattatttcttaaaaagtctgttacatcttcgttatctaaaatgacacattgacctttatctgctttataagttaaatctaatgttgtttggtcaactagttttgcaaagtcctcagttttgtttaattttaaatatttgtatgttaatgcacgatacattgctcctgtatcaacataaatcattgatagttcactggctacacgttttgcaattgtactttttccggcagcagctggaccatctaatgcaatattaatggctttcatgcgtcatttcccttccttgtcgttttatgaataatattttatcataattaggtaaatgaaatataggaggaaatatatgaaacatctacttgttattcatactggtggcaccattagtatgtcacaagaccaatctaataaagtagtaacaaatgatattaaccctatttcactgcatcaagatgtcataaatcaatatgcacaaatagatgaattaaatccttttaatgtaccatcacctcatatgacaatccaacatgttaaacaattaaaggatattattttagaagcagtaacaaataaatattatgatggtttcgttatcacgcatggtaccgatacgttagaagaaactgcctttttacttgatttaatattaggtatcgagcaacctgttgttattactggcgcaatgcgctcgtctaatgaaattggttctgacggattatataattatatttccgctattcgcgttgcctctgatgaaaaggcccgacataaaggcgtgatggttgtatttaatgatgaaatacatacggcgcgtaatgttaccaaaacacatacgtctaatacaaacacatttcaaagtccaaatcatggtccgctaggtgtattgacaaaggatcgtgtgcaattccatcatatgccatatcgccaacaagcattggaaaatgtcaatgagaaactaaatgtaccattagtaaaagcatatatgggtatgccaggtgacatttttagtttttatagtcgtgaaggtatcgatggtatggttattgaagcgttagggcaaggcaacatgcctccaagcgcattagaaggcattcaacaattagtatctttaaatatacctattgtgctagtttcacgttcctttaatggtattgtgagtccaacttacgcatacgatggtggtggttaccaactcgcacaacaaggttttattttttctaacggtttgaatggtccaaaagcaagattaaaattattagtcgcgttaagcaataatttagataaagctgaaatcaaatcatattttgaattataatgattacgtaacataaaaaggtctatgtacaataattagtcatcaacctcatttgacatatcatgaatgtcagtcgttgtaaaactaagttatttagtacatagacctttatttttatgattctaacggcgtttgtttcttagctagcatgctttgagcaataataccaccgtggaatttaccattttcaataaaaatggtattcgcatcgttccctgcagcaatcacacctgcaatgtagcaattttcgatatttgtttcgtatgtttctttattatacataggcgctgttccaaattcatttgtattaatttgaatgcctacagattttaaaaattcataatcgggatgataaccaatcatcgcaaatacataatcattgtgtatcgttttactttcaccatttacttcataagtcacagtatcttcagttatttgggtaacattagcattaaattccatgtcaattttttcatgatttactaatgctgtgaaatttggaagtatccacggtttaattgaaggcgaataatctccaccacgatatagaaccgtcacgttagcaccagctttttccaactccaaagcagcatcgatagccgaattcttaccaccgataataacaacatcttgatcaaaatacggatgtgcctctttaaaataatggaacactttaggtaaatccgcaccttcaacttctaatgtattatgctgaccataatagcctgtcgcgattgttaaaaatcgacattcataaacatctttcgtcgtagtaatagtaaatttattattcatttttttaacagttaatacttcttcaaatgcatttacttttaattgatgatgttttacaacttctcggtaataaactagcgcttgattacgtcttggtttactttcttcaacaataaacggtacgtccccaatacttaatttatcacttgatgagaaaaatgtttggtgagtaggataattgtagattgattcaacgacattacccttttcaataattaaggtatcaataccttttcttttttgttcaatagccgcacttaatccgcatggccctccaccaattatgatactttcaactttttgcattgttccggcctcctttaatcccaaactattataacagttcagtgattgatgcgctaagtctgtgcttgaagatttatgatatattttcgacaatttgtttaatatgcatagagaattgttagctacggagttgaataacactacaatttaatatgttgatttattttttattcttcctcgttaaatttgttgattgtggtgttttatctttttgatgactatgtaaaaaatttaattgatatgccaatattcatgtccatacttattaaataaaaaaactgctacatacttataagcgcaatttaagttttcaataatatttagagaaactttataatatgcacgttcgtatatagcagttcagttacaatttatatagttatattatggaataacgatttgttgaccgtttctaatattgttaccacttaaaccattggcacgtctaattttttcaacattttccggtgaacctgaaccgtagtattgaattgcgatacggtataagttttcttgaccattcactgtatgtctttggccaccaccttgacgttgttgttgctgttgttgattttgattagcttgttgttgattttgattattttgtgcttgattgttcgcttgattagcgttgttttgatcattatcagattcatctttagtcgctttgtcttgatcatcttttgatttatcactgtctgtagattttgatttatctttagaagcgtctttagatgtgtctttatctttactttcatcagcattatttttatttgtattcgcgattttattttcttttgtaccattattatgattgtttaatgccatgcctccaaatatcgctaatgcaccgataattagtacagctgcaattaatggtaacaatactttggccatgccaccttttttacgttctttatctctgtcatgatggtcatgttcatcattgttttgacttgcattattagaggcatgtggttttgaagcggcagaagcactattacttgctgcgcctccagccaaacctgctgttccagcaccgattgctgcaccttttttaccattatgatgttcttttgacttgtcttcagacgctttatcctcagtcgagttattcaccttgccagaattacttttgttttgagcgtcatttgaatgtttcttagctttagaaacacccattgcaccagctgcacctgcaacacccgctgttccagcaccaattgctgcgccttttttaccactatgatgatctttagattcatctttgtcttgcttaacagttacatcatcatgtttatcttttgatgtatttgcttggttagcacctgttgcaaaatatggtttaggttgctgagattgttcagcttcactcttatcagaaactgttgaatgctcagtgttattttctgcttctttaatagtctcgtgtttatcattgtcttcgattggttctggatgtgatttatccattgcaaaagcattcttattataatatccctcttcatgttgaggtgtactgtcttgatggctaggttcttgactttcagtactgtgtgatgattcgacttgacgatcatctattgtgccagcctcattttgaacattgtcttcagatgtttgtgattcattgtgaacttgtttattatgattcgttgctaaatcacggcgtctttttcttctttgggcatttcttggcggaaactgttgctccgtattctctattgtatcctgatgttctaattctgattggtctttttcaacatcttccgtatggtcttgatgtgaatttgtgtctatcgattgacgatttttttcaaagtcatctttaaaattattagacatagccatcttcctttctattctattacaatgattttacataaaatatacccacatgacatatgtttatgtatatttttcaaaattatttcaattatttttcaattgtgtatacactaattatagcttgtcaattttcttttagtaaagtaatactatctgagaaataaattttgcaacttttcatcaaatccaatacttctaattaccttcttcttatttaaaattgcgatatcagttatattagaatcattgtcacaacatcgatcttgtgccggtggatattcaccgaaaaattctaataaatacttccgtctacattgatccaatttgcaatagccaatcatacgaaagaatcctaattgctttcgtttaaatgatttcttaaatacctgtttcaaggcgccgatactatagaatgaatgcaacgttgtcaaaacgtcttgtttatcgggtgctaaaaattctcctatttcgaaattttgtacatcttcttctgttatcatatctgcaaataataacgtttctaaaatatatttatcgtccggttgaaataaactaattgcctgacttagttcaccatcgcgacccgcacgtccaatttcttgaatgtagttagaaggacttgttgaaagatgaaagtgaatgattgtgcgaatatcttttttattaattcccataccaaaagcactcgttgcgactataatcggaatatcattatttaaaaattgttgttgaactgtgtgtcgctcttgataattcatatcaccatgataaatgccagtaagaaaacctgaatcataaataagttgcgctaaattcagacacatctttttcgatgagacataaataatcgttggtcccgactgttgtagaaacggcagcaaccactcaattttatcttcatcatcatgaaaattaagatgcttaaagcttatgtttgggcgattcattgtagttttaataacgttgaattgaatctctagcatttccgtcaaatcatcttgcaaatgcggtggtgcagttgctgtcaatgctaagacaaccgcttctttaaaatgctttgttacttttccaattagagcataatgtggtctgaaatcatatccccattcagatagacaatgtgcttcatctagaacaatcatgccaaagtctatcatagatattaatttaaaatttgacggctgcaggagaaattctggacttagaaagatgaagcggctatgtcgtaaacatttaatattatgctttttctcaatttcatccataccagagtgaatacatgttacacgtttttctccatttattttcaactgcataacttggtcatccattaaagatattaacggtgagataattaatgtcggcttacctgataaatacgtaggtatttgataacacaaactctttccacttccagttggaagaatacctagagtgtgttgttgagacattatactttctataatttcctgttgtcccggtttaaaattctcgaagccaaatttgtttcgtaaaatatcatgcaacattcagatcacctctttcaaaaccaacgattaatacttttaattgaaaatatgataacgtgtcaaattgttctttgtaaaattttaatcgttcaccacgatgttgttgataaaaattcaaaaattgcagttgatcttcttgttcaacataatcatcgtaattagacatataacctttgattaagatttcaagtacatgatcttcgatagtattgattttaacttgttgttgagccgctatatcttctatcgtgaattgttcaagcaatcttgtataagtaatataggtttgatttaataatgtaggtttcattattatttttgataaaatagtatattctccactttctaattcaaacatcattgtcactaaattattcatttcgaattcaaacaattgctgttgagatagtttttctattaaactaacttgctgtctcgtatacattggttcatcatagccttgcaaataataatgtaagtaacatggcccttttaaagttattgctttaaacaagttatgtagttcattttcaaagtcaatttgtaattggttttctttaatatagttatagacaatttttacagtttcttgtatcttattattttgagagattggtacgaaacgaaaatcttgctgcatagtattagacatggtttgcactaatagttgaattgcttgaaatgtttgccccatactttcaaatgtatatctaggatgcaacatgatttccatttcagcattaaattcagttatattttctaaaaatagctcaaaagacggatattttaatagtggtaaactgtgatataatgacaactgttgttgactacaagcgtcaaaaaaggtttggtgagatttcttaccaactaagatattgtaaatacttttatttgttttatagttaaatgtttgttgtaatgctgtttttataatgtgttgcaagtttaaccctcactctgtaaaacggataatttgaaaataaaaatgatgctgtctaaaattttagtcacattactattttagcatttttatcaaaggaggcgaagacattggcaaaatatacaatcgttgatatggatacttgtattgcatgtggtgcatgcggtgcagcagcaccagatatatatgattacgacgacgaaggtattgctttcgtaatccttgacgataaccaaggtaccgcagaagtacctgaggaattatatgaagatatggaagatgcaattgatggatgccctacagattctattaaaattgcagacgaatcatttgatggggacgctttaaaatttgaataattgattttttagacaaatgtttcatagaaaaagcaggcaagctatcgtttattgatagtcacctgctttttattattatgtgtatattattttgctttaatttgattaaattcttttcaagaaattcgcaagccttctatatagtaaaataaatacaatagaaatgacgatacctttaataatattgaatggtataattcctgaaacaatgattactttaagattatttgcgatatcagctaagttaaatatcataccgtataaaggtaatagaacgaaatagttcaagatactcaacacaatagtcataacgattgttgcaatgattaatccagtaatcaaagattttgttgaacgtttatttttatagatggcgtaagcagttaataagaaacttgcgcctgctaaaaagttagcaaatggtccaactggatcgcccatactaaataagtagttcaataaatttttaaccagtgcaactatgataccggcaactggtccaaacgtaaatgtagctagtagtgacggtacatcactaaaatctaaagttaagtatggtggcaaaaatggtataggaaacttgataaaagttaatacaaacgcaatcgcgctcaacatacttattgtgataagacgtttattttgttgcatattcaattttctccttccattcatctcgtaagaataggaggattattgcacaacaaaaaacctccatcttctcccatccagactatactgtcggctctagaatctcactagatcagccactaatatgatacatactagcaggtcgcaggctttatttactgccggttgggaattacacccgaccccgaagatgaattttacattattaaatttaattctcattaattttatactatatatcacaaaacctcaataactatgctttaattagatcatagttacgtaattggagaatgtttcattggtgatttgcgagcattgtttgggtagttttgattggtgatttgcgtactttgattgggtaggtttgattggtttgtggttttgtctgttgttgggatggtttttttgattctatcactcaattgggtcaaaatcgtcataaaatggaaagcaaattataagaatctagtaggttaaaaagttttgtatcagcacttccatatatattattatttaaatcgccagaagttatacttaaaaccttctacttatttgccttcacaacaatagtagaattgtctttcaatacttaatctagccaatatacactaatctccgctaaatattcatcatttattttattcttagtcaaacacaccatattctgaagtgcttttaccgttataatttggtttaactgtatttattttattgtccgaaaattttatactaagatctatactgtttggtatctctttttctttttttatttcttctgccatttttattacattttcactgttactttttttagtatagttcttttttttactaaatagagtagtagttaccgaaagtttagacttatcttttaattgcttcttaacatttgacaattcttttgaaaattcactgtcacttttgtttaataatggttaaaaatagtctctatactcagttaaattatacggtatagtcgtaatataaaaatattcattttcatatccactattttgtgtcttgttaattgcctcttttgtaaatcctgtatattgatatttcttttcattatctttgaaaaatttatataaattatcatacttttctttttgcgctcgatattcaaagccactcagcactatacccaccatcatactcatatcatcaccgttgtcattactacgcattgaacctttttgatggatggcgtctttgtacaaaggtagacttgcattaaatacaatgccatgatcttcacaatgcacataaacttctacaccatcatctttacctacaacattggtagctttaacttttagtccaaagttatctttaaagaattgttcacctactttttcaaattctttacgatgcttcttcgcaaattcaatcgcatctttttctgcaggtggttggaagccttgtcctacatatttggaagcttccatttcttctggtactgattttgtttcattgttggattcgttattggtagttgaacatcctgatagcagtagtgttgctattaagattagtttagttcttttaaacatagctcatcacccatttatgtgtttgtttagaatatagagaaattagctgatttcaagtcattcgacctcaatccttatagactcattatcactgtaattaactcgattagtactaatagtagattttgctagttgtaaaaatattttcgtattttcaaaattaaggtgtaactttttcgtactttcagacaaatctataacatcatctaattttttgtcctttgaaaagttactacttttcgaaaacaatgtagtatgtacttctatttcagctttatagcctactcctttccttgcttctttcataccttttttaaaattcagattattcttctttattaggggttcgtaatattttctatattcttggagcgtcggtatatttgcaactatataaaaatattcattttcatagccattattttgtgtcttgttaattgccttttttgtaaatcctgtatattgatatttcttttcattatctttgaaaaatttatataaattgtcatacttttctttttgtgctcgatattcaaagccactcaacactgtaccaactaaagtactcatatcatcgcctttatcctcacttcttaatgagctatcactgtcaataattgatttgtcaaatggaatactcgcattaaatacgatatcgtggtcatcacaatgcacgtatacttctacgccgtcgccactacctacaacattcgtagctttaacttttagactgaagttatccataaaaaattgttcgcctcgtttggcaattttgtctttatgctttttcgcaaattcaatcgcatctttttctgcaggtggttggaagccttgtcctacatattttgaagcttccatttcttctggtacagattttgtttctttattagattcgttattggtagttgaacatcctgatagcagtagcgttgctattaagattaattttgcctttttaagcatatttcatcacctatttatgtgtttgtaaaacttttatgtttgaaaaagctacttattctcaatgaaaacaagtagcttttaataaataattagtatactgctagtttttctaattgttctttaacttgaattaagtttgaacgaattaacgaagcagattgatccattgtttgaatagcttgcccttcattttcgttcaagccattacaaacaacttcaaactgttgtgccatttgatcaagacgtgcatgagcttgagtgtttaaaataaacatatcatcataatgagatggtaaattgacatttcgtcgttgtacgcaaatgtataaaacccttgttataccaagttctttattatttttaaccttttaaattttccacaagtgtttgcccttatttaaataatccgccctttttttgccctgaaaaaataaccacgtcaattaagacgtggttaccctaatatagaaagaaagtgtttgtaaattttaacatatttaagattttttgattatctatctgtttagctcataggattttttttccttagattgagtatctattaatttaactgtatgattttcccaatcaacttcataaattgatgtatgagttgctctattttcatctttataattattacctatccagtgaagttgattccaaaagtttgtatatctatccatttctctttgataagtaacagtaatttttgatttttttgcagcgttttgttttcgagataggacaccaataaattctggattgaagttacctctggataacactggcattttgtgatattccaagaagttttgtccagcatttaagttgctttgtcttgagcctaaaaacatttcattaccataagttgaatgataactatctctgccatatggtccccaaccattattcataattttatgtgcttcaacatcccaaccaatttttttgaaattagttcttttatctaagctagttctatagctttcttgtttatagttaattgtctctgaaaaagattttgaaccattacctccacctgataagccgttagagatattaatatctccaccataagaataacctaccgtttgttgtacttgaaattcttcattttgatttttaggtgcataatctacaacgtttactgagtcattagaatctgaattaattgaaatgttgtacttagaaccccaataaaattgagaactaatagtgtcttttggatttggctttgtatagccagaataaatgtttccagcagctttgagtattaatgtatctttatcataacttttatctttaataaaattaaaagttaaaatctgagaaatttttaacttatcggaatctgatgttgcagttgttttgtacaaagtaattttatcatcaacctttttctcacttacaggtgtgatatgttgagctgcatcaactgtattggatagcaaaagcaatgcaattgatgtaacaactgatgatttgactatttttttcatatcaattatgtcctttcactttaatttcatgagttttccagttcacttcatatttaactgtgtaatttctgtttacaaatgcgttgtgtattctagatccttctaaataactattgccatagtgtgttgttcttctagtagcatgagtaacatccatatttctgccatacgttatttcaaattcacttgtatctcctgagcctttttcatgagaaacagttgcaataaatgaaggattgaaaccactgtgtactaatgggggtaattcattgtctggcacaaaatagtctctcggattttgactatatggtttatatccaacaaataaatttggatcatgtccagacattttacctaatgatgtgataaatgaattagcttttattccccattgaacactttttgaattttgatgttctacttcactgatatagttttgttgattataactaattgtttttgaataattaaatgaaccattacctcctgttgatggaccactattaaaattaccacctatgttataacctaatgtttgactaacatttactgaatctattttatttttaggtagataatttattaaatctacattggggtcatttgttttgagaccaatattgtattggaaaggccacctcattgcttttatatgatctgtgtttttgtaattgtaataagtagtctttgaattgataaaaccttgcatttttaaaatcaaagcgtctttgttatactttttatctttaacaaaatcaaactgaatattttgtgtgaccccccacttatcgctacttgtatcttctgttcttttgactacctcagcgccatcaccaatattctcaatattgttatcagctttagattcatgaaacgaagtagcaataggagtgattattcctaacgacaatgttgcagctaatagtctttttttgaccataaaaatcatttcctttctttataaattttattacatttttatattaaacctttttaccttttaataaaattaaatatttattaaaagatttatcgagtttaaaatatctacaaatgtgtttttttactattatttcgaaaaaaacccgttcattaccaaacaaattataaataatttatattttgattgataataaacataaaaccacgatatagttgaccataacaactttttaatcatagcacacaatacgaacacaaaataatttatatactaaaaacgtttgtttttttaaaatttaatatattcatgtaaaaattaactgtttattaattttaaataatgagcttgggacattaagttcttaggcaatgtaaaaaagctgatttctattaattatttgatagaaatcagctttttttaaatgtatttgataatatacagctcgtcgagctactattttccttatattaagtgccattaatacaaaacctagctctcgtttaactttatttattcctcgaactgacattcgagtgaaacccaaaatagccttcataaatccaaaaacaggctctacatcaatttttctttgactatagatttttttcgtttctggttcagaaagcttttgattaatttgggctttaaagtattcccaattataattcttcatgattttcttattggatttcgaatttggcttcatgcattgttgcctcaaagaacatgctgaacagtcatcgcattcatatagtttgaagtcacgtttaaaaccatatctatcattacggtatgcatatcttttaaaacctattcttttgttattaggacatataaattcatcattaagttcgtcatatttccagttttgagtgttaaaaatgtcacttttaaactttctcgttttatctttaataaacataccatacgtaataagtggcgttttattaaaatcatctataatagccatatagttttgctcactaccataacctgcatcagctacaatatactccggtaaataaccgaaggtattttgaatcattgttaaaaatggaattaaagttctagtatctgtcgggttttgaaataggtcataggataaaacaaattgagaatttgtcgctatttgtaaattgtatcctggcttaagttggccatttttcatatggtcttccttcattctcataaaagttgcatcatgatcagttttagaaaagctatttctatctttaagaatcgatttttgttcttcatatttactttttctttcggaataatcatcaaatttctttttgaacttcttaatctcagttctttttttacgggtctgttttctaatttgagtacaatcttcgttctgaatagaatgatttaaatcttcgatttctttatctaaatgactaccaattaaatctatttcttctattgttaaatcgctatctccatcttcttttatctctggtattattttttcttcaactaagtcacgatataatgcttttgaattttcgttcaatttcgattcgtgattttgaatacttttcttccacacaaatgtatacctattggcattagcttctacttttgtaccatcaataaaaattgaattatcatcaataagattttgctttaaacattgactatgaaactgaataaataaagattcaattaatgcatcagtattaggatttactctaaaacgattaatagttttataagaaggtgtttgattttgagctaaccacatcattcgaatactgtcatgaagtaatttctctattctacgaccagaaaatacagattgagtgtatgcatataagataatttttaacatcattttttggatgataggatgttgcgccacgatgatgtctgaattcatcgaattcgctatcaggtatcgtttcaacaatttcattaacatatcgtgaaatatcattttgaggaattctaacagaagtttctattggtagtgtaagttgggtcatgttataatttttatacataaggcacctcgttaatttagtttagtggtatttattaaattatacgaaagtgtcttatttttttaaagtatttcaaagtaaaattacatgttaatacgtagtattaatggcgagactcctgagggagcagtgccagtcgaagaccaaggctgagacggcaccctaggaaagcgaagccattcaatacgaagtattgtataaatagagaacagcagtaagataattttcaattagaaaatatcttactgctgtttttttagggatttatgtcccagactcaagattcatcatatacaattatcaaactgcactaaacttaccaaaactgcttattctattacctgccttgtctacctctcctgtagcaatataacgacgttgtccactattagcaatataagtaatccatctatacccattgatgcaatatgctccgtcatatttgattgttgcgttattaggtaatacacctgtaattcttgaattagttgaatagccatccctcacgttattacctttaacattggcaactgtgtaataaccagtttcttttttatacggtacattatttttatcgggtgtataacctgctggcactggcggattcttttggtttttagctgatgttttaacattaccagctaccaaaccacctataggcttaccatgaatcgcaccagctattaatttagaatacaagtcataattcttcttaatccaatccatatcttttttattagtaataaaacctaattcagataaacgataattgatatttatttctgctgatacattaacgttcagtaaatcattacgaggtgttacacctcttatttgtcctaagttatttttaataacatcttgtatacttttatcaatagtatctgcattgaattgacttgaaataataacatgcccaccacttgcactttctcctgctgcgtctaaatgaatctctagaacaatgtcatacccctgtgatttaacccaatataagccataatctttattatttcctacattaacaccgtaagcagtatcttgatacatatcttgtgattgacttgagccaccatataatgcaacttcgtgacctgcatgtcttaaatacttagcgatatttggtgttatatatttacggataaaatcacgttcatttgttccgtttccgactgctccaggatcgttataaccatgaccggctacaagcataatttttttaggtttaattactgcttgctttttggcagttgcttgcttaataacgcttttagctttatctccaacacttactttatctgggaaatttaatctaataaaatacattgggtcatcgtaataatgaacatgtcttgtaacggtttcgggaccccaaccaggttgcgcaacgccatttgtccaacctttaccattccaattttggccaaacgatgtgaaagtgtttagattagcgctctcaacaatttcaacatgtccagctccgccaccatactttgacgggaaaacgacaatgtccaacttttgcggtaaaaagctatcatagtttttaattatttgcccgtatttttcaatccttgctttattatcaaatggaatattataagcgtataaaccttgtaacctttcgcctgttgctatcataaaaaacatatttgcgtaatcgtaacactgaaatccataaaacaaatcaggattgaactgcttccctaatgaattatcaaaccatttttctgcttggttttttgttatcaacattggtcaacacctaccctaaatcatttgtgtcgttcatattcgtaggtgtcattacttctttaattggcgcttgccctgttgcttttctatacttgttttcagctttatatttctttagcttttgatttgcccatttaccttcttgagatgttggattgtctttatacgtagtatataaagcaacaacagtaagtattattgatgatatagtctcatcgtctactggaatcgggctaatacctttgttcgctaagaattgatttactaatgctaagatcaatacgatgtatcttgttattacttttgcatccatttgtttgctccttttttccaaaataaaaagccagtgccgaagcactgaccaaaaacattatttacatttatgaccatacaaatagcatgacaaccatcttgcccaactcattttgtccacctcccttaaggtaataacgcagtaattgatgcagtaatgactgcaatcataacaattgttacaagcgcccatatggcacctacgagccatttattttgggcgagtgtcttttcttcatttttttgtgcaacatctacttgcgtttgatacctttcttcaattctgtttaatatctttgtttgctctaaattctcatctacaactttatcttgcttgtccttaagttctttatgagattcttttagttctttatgatgttgcttttgttcctctctaagttcaagcacatgatcagctgtttcatttgctagtacttcaacatcatccacacgttcaactaattcagaaagctctttttttattttctgaatatcatccaaaactacacctactttctaagaaagctatgagcataatgctcataacttagtatagttacattatttcgctatcaactgatttatcagatgacaagtcagttctatccacaacttctttcacaactttcacaccgttttgattgcctgttaattgatataaaagatttaaagtttcagcaatctttttagcgttttcctcagatttaaaatcttgtgcataacttgctgaatcggacgttgtaaaactgcctacaaaatcttgatacaaaacgcgctctgttccctctttgtcaatttgtactaaaataaatctctctgtttttttgataatttcatttgccatattaaatgacctccttaaatttttgtataaaaatagtgccaaggattactcttcctcagcacttttgcttttttcattttgttcttgtatatatgcttttaacattgcattttcttgtgttagtcttgtgatttcttgcgataaatagtgaattgtatattgtggattggcttgtaaaccttgattgctatcattcatttattaattcctccagtttttcgatttttgattgctggtttttaataataggtattaaatgaacccaaagtctatcgtatgcgataccttcgatttctccgttgtcatcataaataacaaattcattaaatcctaattcttcaacctcttccgctattaagccagtatgtcgactaagtttaaaagtatcatcagataactttttaccactttccaattctttagccattatttccgattcatatttgtcaaaccatgtacgaattggaagctttaaaatctcttttgaatgactgaactgatcgtcttcattgatgtattggttttcgattgaaattttatactttttggcagaagtagcacgcccaattgttccagcagaagtaatgtgtaagttagcaggtgctgaataagtacgcttataaatagaattagaagcgactctatcgccagcattatcagaacctaccgccaataaatcataactttgaatgctaacgtaactatttccatctcttcgtttaactaagttgaatttgcccatacctgattcaattgtagtgtctccgcctgtagcatagtcaccattaacgacttgaaccaatcctttattgctacgtttagaaaatcttaatccagcaccgtacttatagttttcatctgaaccaaacatgatataaccgtcagtttcgtatgcactatcagcgtttgataatgtgaatgcgaatcggtttaaaccaggtttatttttggtgttcggagataaatatatcggtgcttctctactttcaatattagctgaagcatatgaatcgataataattcggttgtagtcagatgttaaagcgactacaccgccataagaattgattgttatgccattcataccactatcactgtaagttttatcccaccattgaatagtaccggatgaacctccgtcttcgccttctccatcaatatatgttgaaataccaaaatgtgacatataaagtgaaccgcctgcggtattatttctaaaccttagatgtccatctttaagacgtgtgaatatatcatcggttgatcgtttgcctttccaagttcgttgcacaataccacctagttcaatagaatcattctgtatttgaacatatctgttattgttaccgcctttaattccaattctattaacattgatatcaagaccctctcttgataaattaaggctgttgacaatatcggttttatctactttatctcgcatattttggataagaaggtttatttctctattaccgttaatatcaattttatcagcatttaatctaataccacgtggccccacatttaaagcttgagccactccgttatcatcatatctgattgttgttccatctgtaacgttttggacaatctcgtttaatatatttgaaagtgtacgattggttgcattaaactcttctttagtagttcttaatttgatttccttaccattttgtataatttgagaaccatagcgagtcagtgttctcctctgtgcatctgtgctttctttgaccttgttgtctgtataagcattagctttcttttcagcgtttctagcctttagttctgcgttttgttttgcctcttcaagtttagcttgagcatcttgtatagcgcgttgctcttcttccgaaattttaccatcagcatacgcttgcgattccttctctttaagattatcttgagcatcaatgtatgattttaaagcttcttgcgcttcttgatttgcttgttcaatacttgctttaatctcaggattattggacaaatcacttaactggtcatcagtatattgtttttgttcttccaatccgtttcgatattcgtttaacgtaactttatctttgatttcaccttttaaagtcgttctctcagcttcagcagtatctaaacgttcaacaataccgtctttgtctgttttatagtccgatgtttttacatagtcacgtaattgttcttttgtggattctctagctgcttcaatagctgatttaacaacattaggttctccgactaactgcaaatcttcattcaccgttaaaccaaattttgttgctattatttccaacgcttctttatatttttcatcagtgtattgtgactgtaataatttaaatctatctgaaatggcgattttgacatcttctacatctgtataaacatcttgtaatttctttctatactcaagaaataaagtttttgtatctaccaaccgaccaatcgttgcagtttcgggtgtcatagattctaaattatttttaatttgattataaacatcaatcacagcgtctaaacttgcttgtaagtccgctttcaaatcattatctactaagtactcgctattcagtaattctgtagcttctgacaaaagactagcgtgttgtatagataaattaataaaaatattgtttaattcactgaatagcgctttctctcttgttataccacctaatttttcaacatcatttggtgttgcttcaatccatcgaccattccaatatctacgcaagacagcaacatcagggttacttgtatcataccaaagcgtatcattgactggattttctggcggtgtatcacttttatgaattttgcgttcaaagtattctaattcaccatctacaacatcttttactatagtattgatattgctaatattgtcgtttaatttttggtgtattaggtttaatcgcttgttaaactcttctcgtaattctgattctttgaactctttaggttgaccgaatgtatatgtgctattttctgaaattatgttatattcttcagcaataacttctgcctctacatacaatggcgggttaaaatctctatgttttactctgactgtatcgccaattgatataatctcgtgcggatacgtaacttccaaatcagtagaagtaatctcatatgacataactgccgacttacgtttatttaactctgttttggctaaagaacttaatcgtgtttcattcatattttgatcatctgattgtggttcatatatcccccaaatatagcgcataggtaggttgaattgactttgcgcttcgtcatctgtcacaactagctctaaacgcttccctttgtcattttcaggtcccacagcaattaatgctgttttgatttctgacatatcaatcttcctagttaacccgactaaatctttaccatattcaatttctttacctttgaataagctgtttttctttttgagtactacatatctacctttgacggtattagagctaagctcaatataaaaatctaaaaccattttataggttgtacataattgctttaaaacttcatatctagtttgataagaagtccatgacgtagtacgtaagccatcgtattcggtttgttcagaaacttcccaacctgtatcgctcaacacatctttcaatgcttctgaagttgtctttttctcaaattttcctggtgcatacggtttagctgttgttatatcagcaagataagacgctatacattctatctctgtgtagccgtccatcgtatcttgaacccagttaataataaattcacgccattgtttgtttgaatcccttataataacacgatgtcgttcacggaacttttcagctctttctgatgatatgagcagttcaagcatttctgaattgtcattaacattacgtttatgaatcgctctaactaaggaagggtcatcagtagaaaggaaatctataatcttgtcgttaaaatctaaaacatgtatcacactctcatctcctttctataaatatctatcttgccatttaaccgtcgtatcaaagacgttttcaggttgtatgattaattcactgtacccagaatcaacattgaaataattacttccaaacgatttctcgctcaacattggttcctcattgatgacaacactttttgcttgcatatctattttcactaaatcacctttttgtataatgacatcccttgcgcctttcggtttcggtagaatctccgtattgaatgaacctaatccattcatctccatccacttataaccgttatacttcgcactatagatagctatgatagaagctggacgctgataaaacttaccgccatctatccactctttctcatccatatcaataggtttacgtctatctgggtctttaatgtgatcaaatttccaagttttaatagaaaatttattacctactcttctgagccgcatataaacaacgattctgtccaagttatacattatcggtttattctgatagtcgtatatctttttggggtctcctttttggttatacaacgtaacaacaatatgtcctatttttctatcatgatatttattttcataaccaatagaagcaagtaacttaccatcactatcataaatatgttgtgctgttcttccggcacctttacctttttgttcaacaatacatttataggtaatttgaaaatctgtcatcgctttagggagccctcgtttcgtgccagcaccaacccaaccttttgcatcaggaaaattagttgctttatatccttcgccaagattggatatcacaaagtcaccgccgaccttaccacctaagtcattacttggaatatcttcagtaatcatcttagtccaacctttgaaatcacgaaactcactatgataaacaggaggcatgtaatccttaacttctttggttacctcatcatcaccaaccataaaataatcttcatcatttttagtaatcataaagtaactagatggtttaattgctcgggcttcaacaattaaaggagtgtcagcagtcccactatttacaactgaaacttggtctgaaatcgcggtgtttttgtttccagttaccgagtatttataaggatctgttaacactacttttatagtgaacttcactgaacctcttgggtttttcggtaattttaatggaccatcaaaatatgcaaaccaataccagttttgagatttgaatttaagttttttaggtgttaaatctttaatattgaagaacttgaccaatgcttctaatatatcatcgtgtgttttttctccacctggtgacaatttttcgtttcgaataattaatggtaaatcaaattcgatatcatttaaataacgattcttaacaatagatcccgctctaccttttacgttttctttttcagtaacaaaattaaaagagggtatctcgaaccctctttgcacaaccagccatccaattgttttattgtctatttgaattgtatcttgcattagattatcgtgcctcctcttctaaatctaactcttgtagattcgtgacgctctcgtttatcgatagaattatttacctcatcttcaaacacatacttattaataactggttcgtaatccttatctgcaataacttgattagactcaaccaaactaaccaaacaattaataaccgcatccagtttattctccaatgtatgaatatagtttgtatcactattacttatacttggatttggtaagttgtttggtcgcttatttttagagcggttatcaatatcgttagcagctaaagctaataatttgtgtgcttcgttcgctctacttggatcagtaggtattatccactctggatatccttcttcccctaagtgatacaatccgttatagactttgccaccactagcatatgcgtaatcaccagcgcgtttgaacgcagctctccatgagcctgttcttggtacccatttacccacaatatatctcatagccgatatagcttgatgagttgggttgagaggattattgtaacccgactttgcgtacgctctaaatgaaggatctatcatttggaacatacctcttgaaggtataccagctcttgcgttgctatcccaattattgactgcattagctgtataattggattcacgactcgcaacacgcatcatctcgttagtaatccaactcgccttataccttcctcctaaaatattttgagcagccttaatagctcgtctagcattagctgcaccattaccaccgggtgtacttttgccgcccccattattctttcttaaccacggtaacgggtctctatgtcttccattccaacgcatctcataatgtaagtgaggtcctgtactaaaccccgtattccccgatataccaacagtctgtccgaccctaacttgttgaccagttttaactttatatttagataaatgtgcataaataacttctaaggcgccctttacaattttcacccattttccataaccaccattatgaaaaggcataacttgtgctctaccattaatggttgatggaacaggttcgtaaatgtaatcaaaatccagaccttcatggaatgggcgtccggtttctcgtgtataagcagcagtgtgaccgtataagtaacgtaatttactcatatctaatacaccgccatcacccgactctgcgaaagcatcctcaagccacttgattgcacttttcttaatcttagaccatgcagcttttgttatatcgccagcaatacccatacctttagttagagaactgaaatcaactccaaacgcttgaagtacataatttaaaagtttgcctggattatcgataaagtccatgacatcaccaactttatcgccaagccactttgtacctttacctatttgatcttttgtccagttaaatgccgatgatgcactagatttaatatctttccacatagtagtaccgaaatgaaatctcggaagcgttccgtttaacattgaataagtttgtgcaccgttgtatacttttgagcctttaggtaaataagcagtagtgtctgtattaggtgtgattacacgtttaccattagggaattcaatcatttcatttctaaaaccatttggaccatttccacgtcctttatccccaactgtagcgaatgtatcacgtgcaatcttaccgttcttaactaatcttgtagtagtatgtgtgtgctctgtaccagtgtgtaacctaggtatttcatccatacctaacttaccaccgacccagtttaagccttcaattaatttattaagtccttttttaatagcatctaccataccgccgatatgatctttaattttaccaatgatagattttaaaccgtcacgcatgtttccgaagatattacgtactttatcccacaaacgaccagctatacctaccgtgttatctttaatagagttccagatgtttgacatccaatttcttaatttagtaaatatatctttcgtcgcattccataaacttgtgaatttagaccttacacccgtaaataacgaatgagccttgccgacggtattgcttttgatattattccacgtactagataaccagtttttcatattagtgaaaatagatttaacactattgtataagaaaccaaaaatacttttcgttgcattccaaattgcagataatgattttgtgaaaatacctttgataacaccccagataccggatattaaacctttaagcaatccaccaaagtatctaacaacacctagaatcttacctacaaaccacagttgtattaaattccaaattaactgcacagtacctttcagtatcattacaatgccgtcccaaacgcctcgccagtttcctgtgaaaagactagagaacactttgataatacccaaaataatattaatagccccttgtattacacctttgatattttcccaagtgctgacaatcaaagctttaaccgccggccaaataaattgcatcacttgccaaatcgcaaacatgattggtttaataataaagttaaaaataaattcaaaggttgctttaatgaaaccagctatattttgcaaagcttgtgttatttctgagccgttctctttccagaaagaggctaattgagcgcctatctctttggcgaaaccaacgattgcatcaactactttaaagaaagttgttctaatcgtattaactacattttgtattcctgctacagtttcgggtggaaatatcttctctagggtaaccgcgcctttactatcacctttgaataaatcaaagaaaccttgtaacgctagtttagctgctttaaatgcgtttgctacaccagagattgcctgatttacaatatttctaaaagtttctgaacgtttataagcttgatagaaagctatgccaataccaactaatgcacctacaattaatgttataggcaacgttaaacttgatatcgacacacctaaaatcggaaatagtttaacaagtgatgcgattttagttcttaaaaacgcgaataaaccactagctttattaacgtttattaacaagggtcctaaaactgtcattgcattccccatcacgctgataaataaaccgaacataaaaactaaaggacctaaaactgctacaaataatccaaacccaacaaccgctaattgaattgacgttggtaatttagtaacccatgtcactactttgctaaaagcacttactataatctttagtgctggttctattctgtcataaatcgttaaggctagttcttctaattgcgaccttaaagttcttaatttcccacctaaaccagattccattgtatcggccattcttttagatgcgccggtagatgaatcttatagatttggttaacttttgatagtcttcatcagaagcatttataatcgctaatgctcctgacatcgcttctttaccaaatattgtagctgcagaactagcttgttggtcttttgaaagatgtttaaatttttccctcagttggtctaaaagctttcgcataggaatcattttcccattactatctgtaatagatattcctaagcgttccatttcattccccatagctctagttggacttgaaagattggtgaacattgttcgtaacgctgtacctgctttttcacctttgataccagcattactcattaaacctatcgcaatagatgtatcttcaatcgtgtaacctaacgcacctgctacaggagcgacatatttaaaagcttctccgagtcctctgacatccgtatttgccttcgagctagtttgtgctaaaacgtccgctaaatgaccactatcctttgcttttaaaccaaatgccgttagtccatctgtaacaatgtcacttactgctcccagttcttcgccagatgctgccgctaaatccataactccgcttaaaccttccatcatttgcttagaatcccaaccagcaagtgccatgtaatttaatgcttcagccgaatctgatgcactaaattttgttgttgcacccatttcgcgagcctttttcttcaaagcttcaaactcttccccagtagcacctgaagttgctttaacttttctcatactgtcatcgaattcaataccttttttagctgctacagcaaacccagcaaccaccggcgcagttacatacatagtcatgttacggcctacatttttcatactgttaccaatttcttgaagtttaggaccaaaattattaaagttggtaccaagttttcccattgcagtatttaatgctttctgctctctttgcatgtcttttaattcttgtgtggcttggtttaactctcgctcatattggtttaatttagcgtaagcttcattgtatttagcagccgcagcttgtgtctttgcactgttttcaccagtttctttactaagtttgtcataactatctttcagctctttagtaatctgggcttgaactttttgttttttactcaaaccttcgacttttatcttcgacttttctaatgaattatcatatctagaaaattgtgataaattagccgaaagctcacgcgaaaccattttcatttgcctatttaaacctgtcacacctctattgaatccagaaccatctaaatcaacctttatgaccatattacctataggattaggcatttaaaaacctcctttcttccaagatgtaaataaaaaatcaacctttaaaggctgattaaaaaatatctttaaaacttttcgcagttcgctttgtttcaatcttcgattcgacaatgtctaaaaagaagtgtatcggcatgttagccactttttctgcatccatgcccttttctatcaaatctttagctattttcctgtaattgttgtagacagcttcaggtgttaaatcttcttttcttatttctgattctctgtcacgaacttttttgtatcgctaggttccccacctgtaattcgtccaattaactgtccaatcttttcaataccttcttgaccatttggtaatcctttttgaagttctatactggtaaattgattatcaaaagcttcaacgatgaaatccaaaacttcttctaatacttccatttgtacagccatgttgttttcgtattcttcttgcttgtttttgtattcttcctgttctgtcacacttaagttattaaattcttcttctgttagatctttaaaatcagcccccttaaaggctttgttaagtttcaaacctaattttgaaccttgaattgtttcaaacaaagtaataatcggcttcgctaaatacttttgatattgcggctttcctgtttttgtaaatcctgtaattaattcaattgatgtacgttccattattaaattcctactttctttttaatttggccaaaataaaaagagggcattaagccctcaaaacttacatttctaaattagattgtactgtaatttgcacagtatcagtttgctttcctgcagtcgctgtaacggtcgcattaccttccgccaaacctttaacgaggccagttgatgttacgctagcatacgtttgcccctcagtcactgcataagttactttctgtccagatggttcggttgtggctgatagttgtttagtagcatcaactttaactgtaacttgttcatcagtgacgtttacagaagtgacttcaactttttctgtttttttcatttctttttctacaggttccatattttgttctcctcgactagacatgaattcatcataagttttaccaaatgtttccatgaatacataatcgcgccctgtagtgcttccttttttatcatagccagtaacatgcgagctctcatcaaacaaacgatcaataaaattgccttctacgtcgtcattctggaattcaactttatcttgttttgtttgccctttgatgcttgaacgagtgaatttacctttgaacaagccaacccattctgaagactcatcatgattacgtctttcaaatacaatcgctacatctggcgggatatccttagctccatatttataaccacctacaccttttttagcgccattcaagaacgccttatcgtcagcaggaacagtaacaaatgttgtcttaacacttagtttaccattagatacagcagttgctgcgaccatatcatccccataatcttcctcggtatcttgtggacggtctacttcaatttcttttaagaaacgaatacgtgtgccagctccagtttcccattcattttctgtatcttttaaaataggtgcataataaaagtttgataccccaattgcgatacccgaaactcctgtatctgcaaaatgttgtaagtttaattttaaaaatcttggtgcttgtttcaatttttcaatcatttaattttcctccaatttcattgataaaatcgagccttttgctcttataatatgtctgaatgacatgacgtcactctcgtataacggttctctgtaataacattgaaaatttatcactttgagtaactcaacaattttttctgcttgctcgttcggttcatcttgagaccaccaaacatcaatttggtaatggtattctcttgaaatctcgttatcatcagcgtatgtgtcaggattgaacggtaagggatatatacgaataataggcttgtcagttttttcgtgaaaatggtcatctatagtgtagttaaacacattcacttcatctgtaatgttatttgcaataatagcgtttctaattaatttggtaacattaatcatttttgcaacctcttagcagtatcaagcattgtttttaaaactttgtttttcccttgcttttctgtttttgttataaacaattgtggtttttggtacattgttccaaattctgttgcatgaatacgatgtgagacgcctttagcgtaaccaattgtaacaattttctcacttgtgtgtctgtctgttttcacattagaaacagctatgtgatcgcgagcatgctttttagtattcgcaaaaggtgtattactttttaaaagcgggactaatgacatagccccagctttgacaattacattactatttaaattcatttttaaaactgcatttttcaaaccttgttcgatgttattactttcaattcttgcccccattaaatgaccacctcgccatagatacgcaaataagatttatcttgataatctggctttacatatttgatgttaaatctttgcccttcatgcaagacgtaatgcttatttgttggtttataatcacctcgtgtatctctgataataatagttttaatgaatttgctacctgtattgagattcgtttgagtgtcggattctttagattcttgaatgcaagcgaaacaagagtataatattttcgtcttcggtttcatcggatttccgttcactctctcgcttacatcttcacaaaaatctatacgttcatttaatttattggaattaaatttcatcattttcactctccaaaaatcgctcaaatgaacctctcaatttatgcaccgtacttaaaaccatatgtggcgcaagcgataaatccctatccaaataagcaatacggttttcaaaatagtaacttgctaaagggtatatagcacgagcaaatagaggatgacttttaaaccaatcaatatatttacttggttcatccgtaacagcgctagctatttcatggaatgcccaagagtaatatatttctaataagtcgtcctctgaattgtgatctattttgcaatgcttttttaataacttaagttcctcagctgttaattgcattcaatcacctattcttcttttactctttcaagtattactccatgctctttcagctttttgttaacatattcagcacgttttactgtcatttcaacacgtttacctgactttaaatactggcctttttccaagtcagtataagatttcttcacttcatacattgccatagtttatcacctctttataaagtatcgagcgcttattatgcttctaagccaagatcgccttcaccgcgttcactatcatcatattcaatcacaattgctgatttataatctagaattctacagtcttgacgtacagcaatcattaaacattctccgaaatgcatgtagtcagtccatgatgcttggtattgagagcggtcaaataaaacaatcgcatcttttaagttaccgataatcaaagtgttattacctttttgccctagtacttcatcaggtaaaatttcgattttagctcctaataaacgctgttgcgttttttctttaacatctggctggattaaatagtttcctagcttatctttcattttgtctaattttgcaaacatagtttgcgaaacaatcgcaacattatgttcgtaatttggcttaacattcaggttaatagcatctttaatatcatctaaagattttgcttttttaacttctaatttcttgccttctttttcaaaacctgaacttgtagaacccgttgatcctttagtgataacatcaataattgctttgtttcgtgttgctgcaatagttcgcgccatccatagtttcaattcttgcaaaacattcacttttgcatcttcgattgcttcacgtgaaattcggaagtaaccacggtgtgtattaatgtcatatgctaattggaagaatggtttaactgctaattcagggttttcttctaattcttcaactttttcaagggctgcaacttctgattgtcgtactaccggatatttaccagaaccatttgtaacacgtttgaccgtcacatacttatcaagattaaactcaacctcttttaattttaaaatatctgtaacaatttcctctggaataactacaaatcctgagtctgtttttaacgaaccaccttgaatatcattgcgtgtttcaagatattcagtaaaatctctaacttcttgtgatgttacctttgtgttttgaatcgaaatacctaaatcattaatgtttgcttggtttcgataagtacgtgcttcgtttacttccactgattgttgattgttttctgaagttccatctttttcttttagcttatctaattcttcttgtttttcttggatttgagaacgtaaatcagtaatttcttgttctaatttttctgctttttctaactcatcgttattaagtgctctcgttgcatacttcacctttaaatcaatttgtcttttaatgtctgaaatctcagattgtaactcttcttttgttttcatttaatttcctcctaaaattggcataaaaaaatagacatcgctatattcagcatgtccaatggctgtatttgataatggtgttcaacttcaccaaatattatttaatatagagtgtttctttagtcttatttctaattcttttttacgttgttcttttttaacggtttcaatactacgtaatgctggtttaacatcagtgtctttgtaagccggataagtcactacagaaacatctgtaagttcacgaattgctgttaaagtacgtttgtaaatgttttcttgttcatcaaaacgcacttcatcgcctttatcgtcaagcataaaaccaaacgaacattgattgatgttgcctacacgcatgttctcatataaatcacgtgcaaatgttgtgtttggtaacttacaacgatatttaagtccaacatcatcagtttcgagctccaaagtacccgattttgtcctaccaattatttgcgatgggatatgatctactaaacaacgcacatcagataaatcagtgttttctaaagcgcgacgtgaaatcgtttctttgaatccaccaagattttcagaccaagtgtcaaactttaacgcatacccctctatgaccatttcgttgttatcatttgagcgtacctcaataatgttgccaactctcgtttccttactcattttcctcaccacctttcaattttttatcagtagctctcgatttattcatctgatactcatctacaagttcaatatttacatggtttaaatcgactctgtgaatgctaccattaccgcctggtattggcgctaatccatcacgttgtctaatttcatcgatattcatctttccagaatcaatgttaattttgtcaatttcagcttgtgttttttcatcaacaactcgtatttcagtggtatcaaatttaaattcacgattcacatattcatcattaaacttaaaattcaattctgcacaaacgcatgtaatataaggttttaaagttgataagtaatctaaattagcatccgtgatactcatgttcgctgtttctatgccgaacttatgcaatggaataccaaatacacctgctatttctcttgttgatgatttgttttctctgataagctttaaaacttctgtatcaacttctaattgatcaaacgtcattgattcatcgagtacgacaactttcccagcttgtttagttccactaaaacttttgtgaaattcttctctggcacggtctcttgcttttttattatctaatacacctttcattttcaaaataccaccagcatgtgtgccatttcgcaagaaattattaaggaaatcttttccattgttatctgattctatcgtgcgacttaatgtgtctaacagtgacaaaccatttataccatccaacgaataaaatttgatgtctagcatatcctcaaacttaacattacgttctatattatttccgttactgtctatcctttgatgaaaataatacagtcgacctcttgcgtctaatttcaattctatttcggatgtctttctgaacgttaaattcataggttctcctgttttatcacgtgtaatttcaatatagccgtgcgatgttagtaaggcactaacaaacactactaatttgaatatatagccgttatacattgggttaggacgtgtatttaacaaattaacaatcctgtcactataattaatttggccgttcactgtcaccctaattggcatgcgcgccaaatcagaagcaatcatcataactgcagtaaagatgtcgctatgcctaattgcttctatatctttatattgtcgtaattttgttccttgaaaacctggcaaagtttgaaccatcatttgcaaatcatcttcgttgtattgcaagtctcgtttttcatttttataaaaaatccccacaactactaactcctttcttgattgctttcgtgatttaaaatcaacgaaataacaatcagtgttataccaatgcataaaagtcctatattttgaccgaatgctttatacacagaaacattaaccacaaacaaacctaataaaaaaaggatgctaaccaaattagcaaccaagaaattaaaaaagacatttattttattcaagtccattttgtcaccacctttaaaatccgaattcttcgctttcatatttctccgtccaattttcttggaattcgtgcattctagcttcagtgaaagctgtgataatcgaaataatcggatctattttttgacgattcatttttttatttattttcacattgtcttctccgtcacgaatcaaaacggcattattaactgatgttgtaagtaacatattatcgttatgctgtattctttcatctgcaacccacattctaaattctttaatagattgtgataacgccttaaaactttgtcccacttcaatgagtggccaatctaaagccattgattcgattgttgttataaaactttgcgcattccaagggtcatagcaaacagcctgtacattcaggtcatgcgtcgttataaatttcactataaaatcgataacttgtttataatcaatcatgccgctatctgattgtgtagtctcagcttctccacgttcaatcgctaattcataatttattttgtctctcttagatttttgttctaagtttgttcttaatccaatgaaagaatgactatgtaaaaacacttttttatcgtcgttagggaaaataaaccctacagatgttaagtcatccaatctcgataagtcgacacctatatacacatctttaccattgatattaggcataggcgttattacttgttcccaatctgaaatatctagcaagctatcttctctttgcgcttgccataaattgaagtttttaatcaaaatcttatgatacgatgtccctttttctaattcgtcttgtatatcagcttttacattttgaagtatagtttttctatgttcttttgattctaaaagcggcattgctttaatccactttgtttcatcttgaacttcttcttgtgaatccatttcagcacaatatacaaagtaattatcagctcttacttcttcatttaaaatacgtttaatatacttatactcttggtacatttgactatttaaattgtctccggccgttgaaacaagtagggttaaaggatttttttgtaatgtcatacctgttttaaaccttgagtacatctcatcatcaggcatacttgccaattcgtccaaaatagcaactgtaggatctttaccatcaaccgcatctgggttattggaaagaggtgcaaacactgaactacttaatacatcttcaatgtctgtctttcttacgtctgttttttcacggataaacttgcttttacttcgcattaggtttacttgttggcttgccatcttgaatattgtttgcgcttgcttataagtagatgaagctacataaatttgtctattaaatttagggtattgtccaaacaacagttcgttaacggacattccggatacgattagagacttaccttgttttctagccatacttatataagctttagtaaacattctgtattgacctctacgccagccgtataagctcccaacaatgaatttctgaaactccataagaggcatgggctggtttgttttagggtctggaagcatttccacaaatttaattgctttgttagacaaatgattatcccaatggcaaccattcggcgggttctccataaaagataggtgacgtttacatacttgaatattcttcaaacttgccaaaatttctcctgaaactaccttttttgcgtatttagtaacataatcagtcattactaatcactcacaaattccatatatggatcatcatcttctttttcatcaggaaccataatacgcaatcggctatcaatagttaatcctaaagtattagctgtttgttgcaatcgaatacccgctttttcctttatgttgaacgccggattaaccttttgatttcctttgtcgtcttctaaaatcaagtcttcgcgctctaaaatcaaacttgctttaacaaagtcactataaaaactacaatattgtgctaattgtgctttatctaagttggaaattggcaattcttgcatgtgcggtaatattcttaagtattcttgtttcgctatttcatctaaaaagtgcggtggttcagtatcgattttagaaaatttatttaattgagcttcttgacgctctttttcaataatttcttcttttgtataattcttgttcgaatttgacaaaagcttcttaggtctacccgccataaattagcacctcctactaaaaaaacttaaataaagggaattttttgagaagaaaactctgctccgttctccagaacctttcattgacgcccgtttcatctttggggggacttcctatttttatcttttttaatatttcttcaaatcttcttttgtcttttggttatggcaagcatcacacaaaggctgtaaattacttttgtctaatcttcttgcccaatcaatttttgttggtacaatatggtcaaccatagtcgcttgattgccacaagaaacacaaataaaatcatgttctaacaatacaattcgacgcatgttttgccacgttttcgatttataaaatcttaaatactctggatcgtttcgacgtctcaaatcattgtaattttcatttgcatattgcttgtgtttatcacaataactttcattatgattaatcaatacattacatgttggatgaccacatcgcttcataatagacaatgccatcactccttgtcgactttcttaacatcttgcacagttacttgtctatcatctttatcattgctaattaacaataagtttcctatcgatccatcaacaagatacttactaccttgaaacaatactttgtctccttgttttataccattgtctaaattgatagtctgattaggtttattcatcaagatagtgttaacactatgaccagctatctcatccaagttaatacctaacacgttagtaagattagctatattccacaatgcttcgctaagttcatttatcataattcctttatctatcggtacattacaaaacatatgctgtttaattagatctgtaacattgcctgtagattgagttaaacctaagccgtaacaagtaatagattcatttaaattcaattcatcattgtgtgtacgtgtagctatctcttggtactttgatatctccattctccacctcttgtttataaaaataaaaaccctcacttaatgtgagagttcaaaagaaatataaatgttttgctacacagcaattataataaaaaacaatatgtagcatcaaaattagtccgaactgtacgatgtgtccgaactgtacgatgtgtccgaactgtacgatgtgtccgaactgtcggtttcttgttgcaagttataaagtatatttactatatcttttactctagaataaaaattgtctctgcctatatcaagaatgctcatgatcctattatggctttctcgttgttttaacatttgtaaaatatgataatctttttcattcgtgatgtattcttcatattcatcaatgaacgctatcttcttaatcaagtaatcgtactttctaagcgctttgtttttgtttataactttcactaacactttattgctagtcgtgcctttagcttttggcatcgcagattgataaccatattgtgcaattgatgtactttcgttatcgtagactttactgtctattatgttcttcatccacttgtagttatctatcatttcacgtatttctttcctgttatacatgcaatacctccgataatataaattactttttaatatcgttatttattcgcttcaattcaatcctgtattcttctaacccgttgtatcctttagttttaactacttcatcaagtagataatcattcatatatctgagtgcttgtatctctcttgcacgatcactattaatactgatacaaactaatagcaatatagcaaatacaatagtcatagtaatccacatcactcacttacctccgctcgaaagacgtaatcactcggcacctctacatcatcattagccgtcatcataatatatacttgctccgttacatacttacctagctcatacattgctagtaagaatattagtcttaatatttgtttaatcatcattgtcatctcctgtatcaatcaaaaaaagtacctgtctcaacatactctttaactgttgttcatttagactggctaacatagggctgtaaaattcactatcttcatctttaacagttttaataaaacagccttcaatctcagctttttcttctggcgttccatttttatacgtcttaaatacctcggtgtgcttttctggtaatttcattttaggtgtattaaacattattatctcccctctttaatgattttatttcttttcgaacaaagaacctaatacttcttcactaggtctttcgaataaggtcactttagaattattagtgtagtaaacaataggtgtattttgtgactcatatttctctttcgcttcttctttactctctgcctcaacaactgtaaacctttgattgcttttagctcgagttatgtgtgtatgcttgcgtcctgttgaatctttgaatgttgtgactaagtattgcgtcacttccccaaaacctccttgactcgatctaagatgtctttacactccgctacttccgaagccttttgctccacgttctgaaacactctcgaattcctccacttgctttagttcaggtgtccatataggcacgataaccaattgagctagtttgtcgcctttatatatttcgtaataatcatttatagtaaaaggttttttcttagcattatttacaaaagaattttccatttctccttgtatatcaaaacactgttcgttagttgttaaatatacttgtgcatcattcttgatattaatccccaaattaccatgatatcccgcgtctatcttgcctgtttcaatcactaaatgcgttttactacttacaccactacggctagttaatagtccgacatagccctctggtatgcttacagctacatctgttttgatcactgccttttcttgtggctcaagtacgacagtttcagctgagaatatgtcataacctgcatccgtcttatgatttcgttcgggcattctagcattttctgataatagttttacttgtaatgtgttagtcattttcctgctcctcctcatatttatagaccacttgccccgtcataatccctactgcttcatcaagaccaatatcttctttgagtgcatcttgcatagcattaggtaaaccctcaagtatttcatcaaacgcttgtgctttcttatacacgtcctcaatctcttttagtaatccctctgtgtcattgccgttatacgcactagcacttataacggattgttctatttgttcacggttattcatttgtgtcttcctccatttgccctaaaaattcgtagaactcatttgttccgtctagttcttccattcgcgacattataatatctgcagtgcttttacctcctatatagagagctcctatcctgttcgctttgctctcagggtgtagttctctaaatttaaaacagtaatgttcgtatcttccaagcaattcatttttgactgtgcgccacatgttctccagctcttcgttacgctctcttaacttagctatatccccaataagctcgtcacgttgcttcttgtactcatcacgttgttttctcatcttcttcaacctagcttccattacgcctatttggaatcctgtttcatagttcactttcataacctcctctaaaataaagttagttgcttctgttcctcatattccaaatcctgttgctttatatatgtttcaagctcttcagctgtatcaaatgtctttttcacgccttgccaacctggtacgatatgcccatgaaagtaataagtgccatttgctacatggatatgtgccactcgttcgttatcctgatacagatatctcttagatccgaaaaattggtttaagtattctttgcgtgcgctatcggttttaggcatttatacttcctgccatttcttaaacatttggttataagtagtatcaaaccagtacggatcacgtgaatgtttttgaggcacattaaataaatgtggcttctttcttcttagctctgcctctttctttcgctgtctttccaatttacgttcgagtctagcttgttccagtctttctattgtttccttttctctgtactcgcttaaacgcatgccttctggtgcgtccattgcttcatgtagttcccaaccgtcttttactcttttagaaaccattccgggtgttataccgtgactttcaattaattccatttcaaatttactgaacctataaggtttatcgtgtatccttacaattcttgctgttttcgccatttattccacctctacatttacatttctaatttttaaattgtcatactctagtatttcgttaggattgttatataagtaatctgccagcgtttctttttctttatccacatcaccaaaatgcttattttcaacttctgtaggtattcttatatcaatcgttgcgtttatatatgcttgttgttgcattagatcacttcatttctcttttgcgttctcgtcttgctttaattaattcctcgtaagtaatccatgttttgcctgtgtacttaggtgctttacatatccaattgagttttatgtttctgtatttatgtctgaaaatcttagctttaagttttgctacttcggttggcatacctttaatgtcgataacttcaatcagtttgtcatcgagatataacgcgaagtctgcaatatattcaatctttcgttgtttatctagttttggtaataattcgaatttcggttgtatttcgatatgatcataattagtgccattcatattactttctaaatattggtaatattcacactctactttgctatcaaatacaattcctttgtactcaactttcttagcattgtatttactcattgcgccacctctaaatatcaaatatcgttgcttgtaaacctagctcttgctcatatagaagtccgtgagcgcctttaaatcgttttaggtcactatcagtcataattttcttttcgtcgctgaaatgggctcctgtgagcgaataaacttcattctcgttatcttcatgtttgatgaccttaatatcttccgcgccatcttctcggtataagtaatatttttctttcggcatttttaacactccttaatattcgacgattgcgggtctttcttctttttctttcaacttatcatcaataagttttttaagtttctcttggtctccgtttgcaaaatcaatcatcttttgagcatatacatctctacaatgtaatatttcttttatattttgttttgtgattaccacgcatctcgctccctgaaatcgtctccgattactcttacttttcttgctctttttttcattctcgaatttatacgttgccagttcatattttgatttagttctttatcactaaagttagttgtaaagatgttgtttttacctactctgttatcaacaatgctgaaaagtttatttatagtgtgttctgtgttttctacacccatatcatctagtacaagtaaatcaatctcactaagtaatttgactagttcgtctgtagtctctactgcatttttgttgtatgtcgctttgatacgatccatcaacattggtatatgcataaaagcaactgtatgccctttagctttaactgcttttgcgatagcgtatgctaggtggcttttaccagttccatatgaaccttgcaatattaatgattttggttcttttgtagagaagccttgtacgtactctattgctgtttgcttagcttgtacttgtttttcattttgtggcttgtagtttttgactgttgcatctcttaaagacggattaacgtttgattgattgaatatgttgtttatcttccgttgcttgtttcgcttatattcctcatagatttcacatttgcaaccgtctttatactcgtaaccattcgggtgttttttagtaggagcaaacttatataagtcgtattcacttccacatctctcacatttcaatcctttttcgacatgagtaggttgatattttttcaagctttcgtttatcttttcgctgaatagtggtttcataatatccccctaatcccaataactttcgtcgtacttcatgcgttccaattgatctatgccagttggttgcgctttttgattgaggtacccctcaaatttattgccaaaaagtgtttctggtctaaggtatttatcgctatccgtgtttagccactcagctgttttgatatcaatcacctttttaaaatcctccaacctaaaatcttgattccatcttgctttaataaaatcttttgatttagctgtattgtgtttaaaatgctttcctgtttttttgtttaagtattcgataatttctttatagggaatggaatacacagtcgggttgcccgacaatatacttccatcattattagtattgttattattagttaaatcattattagtactattattattagtagtacgcccttttcggttttccgtttttccgttttccgaaaacccgtttgccgataatccgttttccgaaaatggcatttcggttggtttttcgtaaactaagtattcaaaacctttaaacacaccgttttcagctcttttttgtattctgtgaacatatttattatccataagttcttgaacgccactattgattgatttttgtccatcattcatatgtttaactacttctgacgtgtatatttgccaattgtcaggacgacttaggaaatacaataatatccctttagctttagcacttaaattactatcgaacacaaaagatttatgcacagttacaaaatcgccactttcttttatcgttctaaatgttgccatttcgttatctcctttctggtataattttattatcgctattgcgttagattgggggtgaataattatggatcctattttaggtaaaggtattgataaaattattgaaggcgcatcaaaagggcctgtagaaacattctctaaaacttgggaacttgtctttgggaaattccacctttatgtggataaagttatttatcaaagagaagtagaatttgaaaaattcaaagaacaatttaaaaaagaaatatcttctgtacctgaaaataatttacaagaaccacaattttctcttctaggtcctgctctagaagcttcaaagttttacattagtgaaaaaactttaagtaatatgttcgcaaaactaatagcatcatctatggatgacagaaaaaactcattaacccaccattcatttgttgaaataattaaacaattatccccaaatgatgctattcttttaaaacatttaaagaatcacgaagtacatcctgccgttaaatatagagcggttttaaacccaaagaatgacggtatgaatatatcggacacgttaataaaagactctccgttagatatagaatcaaccgaaatttcaattaataacctagtaaggttaggggttttaaatgaaacttttgacatgtcttacttaacaaaaaaaggaatttataataagttttatgctcctcagtttttaaatcactttaataagattatagaaaaacaaagatttgtttcgggattagaatttgttaaaagaatgttaaagtcaggacacaacctagaaacaataagtaaactttctggcattgaatttgaagtattaaagttacattacagcccctgggtaatagacatcaaaaaaggctcaattagtttgtccgcctatggtaaagcttttgtaaaaacctgtattaactaaacggagattttaaaattttctccacttttacagcatgcatagcatttctaatctcttccgccaagatgacgattaggagtgctatttttattattcttagtctattcattcctttttctctcctttcaacattttattgagcctctcatcaacttttatccacgagtcatgcaagtgatatttatcatcaaacgacttaacaccaattgcatgttgctcgttgtgatgttcgcgacataacgctaatacatgtttgtcgtagtgattcatcttgtttctgttcatgcctctacctactgcttcgtaatgtgctaggtcagcgtgaggctttccgcaaattacacagttgcggttgattgtagcccaatataataacgctttatcttcgcttaacaacttactcgtttctacactcataggtatttgatgatgaaacataaacgctataatcagttctattaactcccttgcaactttcattgaacagtcacgcagactgatttcttcataacctttcataatttccaattctgtttgtaataattttctagttgattccactggttcgccccagtgaagttctatatctctacacattgcgaatatttttttgcgttgttctatagataactttttattgtccggaacctctacttctgcttttagtggatatccgttttctagcaagtcaatgtgactttgttcaagttcaacaccagtagcaacgacggaataagtgccgtcattgtctttctggtatcttgtaatgtattgcatttaaaccacaccttaaaacgctaaatcttggtcgtcatatccaaattggccactgctttcaaatggattgctttgttgagacattgatgtttgttgttgtgccccgttattttcttcagctttttgcttatctgtcttcggaataggtttgttaacaacatcatcgccctttttgtaaggtttaataaatgaaaaatccgtaaaatacttaccttcatctttattgaatttccatttcaataccaagtgacaaaacttaccaataagatcattggtatcaaaatctaagctaggaagatttaacttaatacctaatcgagtaactaattcaatcaattgtttttcttggaaatcatatttatacggcggtacaaattgattatgtttatattgtttgccttcatcattttcaaatacgattgtgaaatatctattttctctatcattgaattcaatatttttaactttcactgtgaattctccagcttgaaaccctgctgagccgttataaaacttttcttgatttgtttctttagtaaattgcgcttgtcctgtgattttcataattaaataccgtcctttttagttttttattagtttccgttttgtgccatatctataatttttgaaattgaagcatttttaatacctggattattgattgttatttgcggattatgcctaactttagttgtatataaattagaaggttctacagaaaacacataattgtgtgtcgcatttccgttctcatctgtatgatcttctataaatgtgtgtcctataatgtcgaactgagttactaagttgttgtgtattgccggttgtacttcaattgatattctagggttaataatttttccgttctcatctttatcttctgagttaagcccttcatgtcctgtaagcacaacgtgaaatccgagcttatctttaacctttaataggtgcctaatcgagttaacaattaatttagatgtttccccataatcttgaattcttgcttttttgacttggtgcgtgttcatcacatgagtcagcgttatatctcttaacttttgtgctgtttcaattacaaccacatcaagtaactttcctctttgtctagctgtatttacaatcgattcaatactcgtaattgtgtttctaaaagcaatgtaattgtcgaccctcttcacaaaaccttgccgcgttacttgagtgccatcttcgtgaatatcaataataaaagcgttgttttctctagtggctaaagtcgtctttccggttcctgatttgccatataccataattgaataatagttctgagtatcttcgttaatttcttcaatacctagttcttgtaaaatgtcttgttcctcactcatcacttaatcaccaaactttccgttacctttaattcagcacccggaatatctttgccagctttcaaatcatcgattagttgcttagaattaagtttcggggcttgtgatagccaataatcctttggaataagtttttcatcgataatatttttactagccccgtttttacgcttgtaaatatgattagtagctgtgcggtaactatctacttcctgtgtttctaacatctcttttaagtaatctcttaatcgatcagttaaattttgtttttgtttttttaaattttgaagtctcttaatctctttatctatgacatctatgtcacctaatgtttcgcgtctccaattgacgatgttatctactttgacattcatttctgcttggatagaatctaatgtgtcttttaataatgtttggtctaattcatcttgattagacatctctttaaatgcttctgatagctcatatagattagccattagttaatccccctctaccatttcatgactaagttaattagtctgtcctgttcatctgtgttctcttcaatccattcatctatcgcttggttgaataagtctgatgccatatctaagtcattctcatctacgacataagcatgtttaattggtacgttgttcatatctttaacttgtattgatatgcccatatgaccttttaaaatgaatagcttaaaatcgaatccgttaacatgaatatttttgtgtatgatatcgcctatttcgtaatacattgttttagtcctccttgtcgtcatctataccgagaattttttttaatttatacatttcaataacattagcgatatcgtggtaatcattttcgttattcaataaattagcaagacctacaatatccccaagcgcacaatgtgacgatgatgtagtatctccattgctaacccctacagttgaaaaaagtaaaacagcaaattcagtttctttattgatttcattcactacttcaaacaattctccatttttttcagataataagtcttttatttcttcctgcgtcatgtctttataatttttagtcatggttgacttcctccgtttttcgttttatatttaacttgaattttatttcttaaatgtttgttactgttacttgttggcgcaagtagcagtttttttattcttcataaaagtattccttatagaatatgaatgttgcgatacttgcgaatcccgcaattgaccacgctgtagtgaagtatagaaacggcatgagtacaatcgctaagactgtgaagcatagtactgctaataggtagcttttatatgtgtcgctcatttaatatcctcctaataccattttttatgctttctgatcaaatactcttccaatttagaaatattaatcagagtgcctgttggtgaataatcaatgtataaattttctacacctaaattatctttgcggtaatatttcaaccagttgtatactgtacttctacatactccaaacaattgatggatttgtgtaggtgttgcgtataactttttcacaaatttttcttcgcctctatatgtgttttctggtgttggtggtactatgatttttgacatttctatctttcctttcgtgtataatgttgttatttgctaatagtttgttcggcgaacttcaaaaggcgacgagcagattcagtagaattttcagcatctttcggtatggttaaagatttgttgtttagatagtcactcaacgccctgctactaatcacaggttttctagtgtgcttctcaatcttccaaaccttccacgtcacaactgccattgtgatgaggagggttgttttatacaatttgttcactgtgaatcctccttaaaaaacaaacttctaaatcctgatttttcatatctaccgggtctgcctttttcactctttgcataatgctctatgtttatgtcgtaaccaccttcgtaatttccgtttctagttacccataaaaatttaactactcgtttgctcttcagctctccacctttataaatgactaatggaacgctgttttcatctttcactttgatgacaattagatctttgtgtctgatatttttgttgaacttttttaaaatctccctcatctcatgaatttttttcaatattaatttcattactttttgaatgttcatttgttacatctcttttcgtgtataatgttgttatcaacctaaggaggtgatgtgtgtgaatatctcaacttttttagtactacataaagcctgtagcaaagaaaaaataaaactatctgatcagcataaagactttgaatacatgcttcgcaaagaatggattactcaagttgagaacgacctcgaaatttctgaagattcttcattctcgattctgtatatgaaatacagtggttacgtgtctataacatctaaaggtaaagatgtttatttttccgcgcgtaacagctggattagatggattcttggtacaatcatcagtatttctatagcaattgcatcactagtaataaaagcgttactagaatgctagttgcacaaatcaaagctacgcatgggattaaatctactatccaaacccttttttgattaggctcatttaaatatttatacatattaaatagcttttctaactcgtcattactgatgatagatgttgaattttctttatgtttaagtgttttaagaattagtagttctaacttttctttgattggttcactcatttgttacatctcctttcgtgtataatattgttatctcctacagagaggaggtaaggaatctatataaaacctgttatcatagaatcgcggacagaacaccgagaatcagagccacaagtgacagagttaacatcagcaaataaggtaagtgctctttccaaccccaaggatggttttttaaagaagtttttatatcatttaaaatcttaaacatttgaaatcctcctttttcgtcactctttaattggagtggcgttgattttttgtctaactttttcaatgctaatttgtaaataactgaagcatgttcggttttaaaatgagattcagcaataattttcaatgtttctaatttatttcttgcatcaccgtatgtggtactttctgatagaacaccttctaaaatttgttgaactcgataatctaaaagttttaagtctttattgatgcattgttcgacacactcttctttggttaatgtgatttgttccatagtgttctcctattaagatgtttgtttttctcctaaaaacttattaacaaagtattgttgtcctttgcctgttacttttggcgtcttactaattgatgtgtgaccgtccgaatgtgtgattgatgtttctttaatttcgaataactcacgttccattgaatactgtgtaggcatgttataatccacacccttgcgtttaataaggaatccgttttgacgtaaccactcaaacaatctgcgttgcccgatgtttacaccgttttgtttaatgatctttgctaactctccaactaaaattgatgtcttagtagtagctactgcatctgcaaatacaatttttggtttatcacgttcaatctttgtttctaattgattgattgtgttgttagcaatttttaaagcacgttgcataatcatttctgggctgttccatgctttttcaacttggatgaagtattgtcttgcacgtttaccaggttcactgcgttgaatcattgcgatttcttttgcagtgtctagtgtgagtgcgtggtcagtttgattctgacgacctcctagtgggttatggacaaaaatgtccgtgactacataatcgatattttcttcaaatccgtaatcactcattctttcaaaccattttttgtatggagtcttaacctctaatgcttgatgaagttctcgaccgctgattgcgatttctccgttttctttttcttgtatgttgaacatttcgccgatgttcgattttgtttgtaatgcttgcattgttcgttcctccttttaagatatttgtacagttttctgtacattttgttcaaaaaaatatctacctacttttgttggtgggatttctaataattcacagattcgttttatttcccattgtgtgaataaattttttccttgcaacttgtgattaatagatgtccttgaaatagggattgcgttcgctaaagaactttggctatatctatactctgccattctttcgtacagcaaactataatcgaaattgtatatcataaactcacctcccttcttgttcagttttctgtacaaatcaattaaaacacctttgtttaaataagtcaacacataaaatacatttttctgtacaatatttgttaaaaattattgataatcgtcattgtacgtagtattatattcttaggaggtgttcagaaatatgaacagttttaaggatagattaaagcaaattatgtctgaacggaagatatctcaatcagagctatcaagaaggactggtattggcagaaactcaattagcgattatttaaatggaaaatatgaagcgaaacaagacaaagtctttgaactagcaaaggctttaaacgttaacgaagcgtggcttatgggttttgatatttctaagaatagaaaaattgaaaataacgacatcacttccatatacaacaaactcacacctccccgccaagaaaacgtacttaactatgcaaatgagcaattagatgaacagaataaagtcacttctatagatggatataaagagtctaaactagtatcgtatattgcatgtggtgcaactggtgctggcataggagaagaattatatgatgacatattgcatgaagaagtattttttaaagaagacgaaacgccatcaaatgctgatttttgtattttagttaatggtgattcaatggaacctatgttaaaacaaggaacatacgcttttattaagaaagaagattctattaaagatggtacaattgcactcgttgtattagatggagtaagtcttatcaagcgtgtagatatatgcgaagactatattaatttggtatctctaaatccgaagtatgatgatatcaaagtcgcttcgtttagtgatattaaagtaatgggcaaagttgtattgtgattaataacgtatatttagcgctttaatataaatataaacaaaggagagatacatatgaaaaaagtaatcggactgctactagtaagtacattagctttaacagcttgtggtgaaaaagaaaaaccaaaaaaagaagaaaataaaaagtcacaaacacaaaaacacaaagatagcaaaccaaaaacgcaacaagaaaaaatgaaaaaagttgaagataaaaatccacctaataatagcatacaaaataattcaaacaatcaaaaccaatcacaaaacaatcaacttaataataattcagatccatctaataatactcctgcaaatataaataaaaacgattcacaaaatactaatttaaatgatgagtatgtcgtttcgcctggctggactaaagatgaacaggctaaagcttttgaagagtacaaaaaaggaaaagaagacgaagcaagagctggtgctagcgcagtaccaggagccaatattaactaataaaacaatataagaaagaagagctaatatggaaacaaataaaacaatcgatttaatgaattatgtggaatttccaaaaagatacacagaggcaaaaggcaaattagttgcacaaccaataactactataaatagcgcaagaagagttgaaaatgaagatatgactgtttgctacattttagatcaggatgatgatgtaatggactttatctttgacagagatataattactgtttactgtcctggaaacggaactgcgactgatgaatatttttgtgaaattatatttaactcagatgacacatttaccctaaagcgattatctaattacgttaccattaaagatagaagctacccaatgtcaaaaataaatgacgtaaacattacgggcaaagtcgtcagattatttagagattttaaataaacttggctttaattacgattaaaagtacctatatagcgtgacgagaaaaaggattaaaaaaaaattcaaaaacgcctactagtgtagacgttgaatggtggtgagaacgtgagcgagaataaaggagaaattagaaatggcgagtccggaagtgatcaaaaattaactagcggtcaagttgaaagtttaatccaagaacctaagaagaaataattaattttttcttatcgatatatagatattctaatttaactttgttttcaaaatctaaatatgaatcattgtattcagacaatgttttgaaggcttcgtaattagcattaaatctagtatcaagtaatatatttcgattgtgttttcttgaatagttatcaaggaatcctttttcaattatgttaccttcgaaatcttttacagttatgaacattttatatttattatcttcatactttaatagatgtacaggtagcgtttcaactttttttaaattattacttttacggttatgattactaaaaatattgtatatttctataatttttgtatacacgaattctgttaatatgatgattattaatatacttactattagtgcagacaatgtttttgtaaaagttaatttttgaaatagctgatttacgttgttttgtcctgaaaacagactaagagttaataaaaaaataaaaacagaaactacagaaaagaaagcgagaataactttcttattatcactattgaaatacaccaaattcttattggatagagcatagtaagtataaaatcctggtatcccagttgttattatcaatagtaaaatttgcaaaatatcacctactttttattttattatatcacatttagtacctagtactaaatatcgggtagcccgcctacccttattattttttgccaattttgaggagggatgtaaaatgtggtttgaaaaatttaaaaataagaacaatgaaacgaagtatagatactacgagaaatacaaagatccgtatacagataaatggaaacgtgtaagtgttgtcttgaataagaatacaaaacaatctcaaaaagaagcaatgtttcgtttagaagaaaaaataaaagaaaaactgaacaacaagtcgtcaagcgaattaaaaactttgacttttcacgcgctattagatgaatggcttgaatatcatataaaaacatcaggttcaaagttgactactcttaataatataaaaataagaattagaaacattaaacgatacagctctgagaacttgcttttaaacaaactagatacaaaatatatgcagatatttattaataaattatcagatatctattctcaaaatcaagtaacccgtcaactcggagatatgaaaggagctattaaatatgcagttaaattttacaattatccaaatgaatatttgttaactaatgtcaaaattcctaaaagaagaaaaacaatagaggatatcgaaaaagatgaatctaaaatgtacaactatttagaaatgaaccaagtcctacagatacgtgatcatatactaaatgataataagttacacaagcgaaatcgcattttaattgccagcatcttagaagtacaggctttaactggtatgcgcataggagaactacaagcactgcaggaaaaagatatagatttattaaacaaaactattaatataacaggtacaattcaccgcattaaatacgaggaaggattcggatacaaagacactacaaagactataagttcaaaaagaagtatcagcatcaattctagaaccgtagaaatttttaaaaagataatactggaaaacaaaatgttgaaaagatggaattcgagctatgttgacagagggttcatattcacaacaaaaaaagggaatcctttatgtaataatcaaatcgccggtgtgcttaagaaaactacaaaagctttaaatatgaataagaaagttaccacgcacacatttagacatacacacataactttattagtagaaatgaatgtttctttaaaagcaattatgaaaagggtaggacatgtagatgaaaaaacaaccattcgcatatatactcatgtaactgaaaaaatggatagagaactaactcaaaaactcgaaaacattccaagttagcttaaatctgccctttttttgcccttatattttttacaagctttataaaacgcttgagaacactggcgttaaagcttttcttgaaataaacatatcatcataatgagatggttcaaaaatttgattaacaattaatggcttcatatttctaacaatgtcatctaagtgattttctaaaattggtgaagctgtttttaagttatttaaaaattcatctaaatttttaagtttactttttaaaacttcaaggtttttatcaatttcgtcgacatttattcccatagcctttatctttattttcattgttactttgtatattaaactgcttatttcataaatatgtctcacagctgtttctaccgaatgtataacttcaagaatgtagtttaatactggttcaaaataattattgtaagcttcttgaacataatcactaattttgttaactgcattatcaatatggttttttaaaattgtcatttttctagttaaataattagaagattgtacttgacccgaaatcatatgttcaccgctataattaatagataagtttccatccattaccgttgcatcttgatgagacattatatttttaatatcggttatctgctctccatatacatcattttgtttttttacaaaatttatattattattcacaacatttaaatgcttcatcatttcctctgtcacgccatcttcaaaatcatgatctaaatttttaaacatttctttaattacgttatccaatgaatcatgtaaactttctatgccacgttgtaattttttatctaaatcttcaagcatttcttcaatagtatttaattcaaaaataaggactgcaactgatgaaaatatgaaagcaattccaacaagattttttttgacattatcaattgcgctaaatgcatcctttttcaaagaagttaattctctactcattccttcaaggatatcaacttcgacaatctttttaaaatcttgtttaagtttatgttttctttctccaaaattagcattttcaacctgtgaaatattatagctctcattcaaataatttacacaatcggttaacatattacttgtttcaccagttaccaaattacttaatgcactaagattttctagatttaattttataggagtccctttacccgttctcgctattgaatctcctgtccacacattaattggaattctatcatccatatttatatcgatttcaatagtttttttgacttttttaccatttttaatcatagtatctttaactgatttaattttataaactgctaaatccttataagtattatatcttggatttaattttcttttataacctaaatgactatttactaatccatccatcgttggcacaccagtttctaaattcactcgttttcctagtgtcggagtggcaaatggatcctgcagccaagataaaatatcaaacttactatgataattaatcatattttcaaagttttgagatttgaaattttcccatattgactttggtaacatggcagggtttgtagaaactatatttttattcgggttaatcatcccttggtggttagcatttgctcccccttgagaattgcctccatcagacttaatagttttgtttttatacgtagacggatttttcttatatttccttaaaaaatcagagcttttaagtgtatctgcatcttttagtttctgttcatacgatttaatataagcattattttgttctaataaagaagttgacttatttttatcattcattaactttatattttcaatccaatcatcagcaaccttcccacgaaaaggattgttgcttccgatactcttattattatttgtaccttggaagataatagcttgttgtcctgttaattcattattgctatttaccaattcaaaaacttttgcatctgtaccaccaaaacttttagaattaggattgtctgaataatcttcaattagtctatatttattattatttactctaattacatatcttttgtccaaatcttgatatgcccagtatccacttaattctgctaaatctctatcattaattttttttcatgattaaatactcctacttctattgaatctttcttactgtaactaggtcttgctgaatttatatatttatcagtaatttgaagagaaacattcaaatcatgaggaatattctttttcttttttagtacttcagaaaaatcaatcatctcgtctattgtattatctttagtgtaattgtctttagtgctaaataaagttgtaacaacatatggacgagatttatctttaagttgtttttttgagtttttcataccatcactaaaagtcttatcatcctctttgattaagggttgaaaatactttttatattcatctaaagtatatggaattgcagtcaaataataatattcatttctaaaaccactattctgcgttttcataattgcattttctgtataaccagtatatttatatttacttttatattctttcaaaacttctgttaaactatccaactcttgcttatgagctctatattcaaagccgctcaacactgtacctactaaagtactcatatcatcgcctttatcctcacttcttaatgagctatcactctctattatcgatttgtcaaatggaatactcgcattaaatacgatgtcgtggtcatcacaatgcacgaatacttctacaccgtcgccactacctacaacattggtagctttaacttttaaaccgaagttatccataaaaaattgttcgcctcgtttggcaattttatctttatgcttcttcgcaaattcaatcgcatctttttctgcaggcggttggaagccttgtcctacatattttgaagcttccatttcttctggtactgattttgtttctgtattcgtgtctttacttgattcattttccatcgtggaacatccccctaaaattaatgtcgtagctaaaactgatccaatgaattttttcatatgacacctcgaataatttaattattacaatatatctatattttaccctatttttataatcaaataaataactttatcaaactttatatttttatataaattagtaatatatttaatagttgatattcgcaaaaaccctaaaccctaaatcctaatccacatacaaaactccccacatcaataaaaaaacgcatgctataaattagagtctctaatcaataacatgcgttctgaaataactatattcaattttattctggttttggtagtttaataataaatgttgtgcctttccctaattcgcttttaacatctatggaaccaccatgctcttcgataatcattttacaaatgaacaaacctaaaccggtaccttgtttacctcgcgttctcgctgcatcaactttataaaaacgatcaaatacttgttgtaaatgttctggtgcaatgcctgtacctgtatctttaatgtataaaatatcttcgctttcattttcatcacaagtaattgcaatttcatcaccaggtttcgtataacgtgatgcattatcaattaagttcgttagtacttggtccatgcgatccatatcataagtccaaacacgcttcttacaataattaaaagtcatatttagacctaaatcatcagcctgttgacgatacttaattttcatcttatctagtaacgctgcaataggctgaacttctttatttacggataacccttcagcatccatgcgagcgacatttaacaattcattaactaaacgatttaaacgtttcgattcatcaaggacaatggcaagcgattcttttatttcatccggttctgtaacaataccatctacaattgattcagtataaccttgaagtaatgatatcggtgtacgtaattcatgtgatacattagcaatgaaatctttcttcatttgatctagattgtgctcattagtcatatcacgaactgtcacaacaacaccacttttacctccttgttcaatcttgtcgatatagcttgtggtcacaacaaagaatcgtgtattcatttctaaatcacgcatttccgtttgttttgatttaaaagtatcttcaatttgtcttaataagaaagctttagcatcttcatcaatattgtccataatatcattcgccatcttattcgataagataatttgtcgactctcattaatacctaggacaccttctaccatagagttaattaagctgtctctaatatttttagatgtggataatgcgtcgacatgctcttcgatttctgtactcatctgattaaatgcctgtgataattgaccaatttcatctttcgttgtgacagaaggtttataagagtaatccccttcagatacacgtgtagcttggtctcttaaacgtcttaaaggttttgtaattcttgacgataagaaaaacgcaaagactgttgtaattgttaagaaaataacagccgtaattatagtgataatcgtaatagcattatttgtatcttcgattgatttcaagtctttatatataaagactccactatatttgctatgactattcttctgtgcttttgttggatagcctaacaaaatatatgtttgagatgagcccttttctttaatcgttacatttcgagtaacagatttacctttatcaaacacatcgtcaaaatggtcgttgttgactacttcattcaacatttgctttttaatattagaaagcgaagccgttgattgacgatgtttattatttataatcatcaacccaccaggattttcaattaatgtttgactatattttattgcttcttctttattatgtgattgttcgaccagtgaacttatacgtctagcatcttctcttatggcattttcagtttcttgtgtgaaatagtattgcataaaggtaattaaagcaatacttaataaaattaaaactgtcgtcactattaaaataatagttaaccacagtttaattacgacactatttagccggctcatcattagatttaacctcaaatttatacccaacgccccagactgtttgaatcatatgcgcagcttcgctagacacacgatttaacttttctctaagtcgtttaacatgagtatcaactgttcttaaatcaccatagaattcataatgccaaacttcttttaataattgttcacggtcaaatactttatttggtgttttagctaaatatattaataattcgtactctttaggagtcaaattaacttcttgattatcagcaagtacgcgatgtgcatcattatctatttctaaatgtttaaatttaatcacatcacgtgcgtgaggttcgctttgttctacagttgtagattgcgttcttcttagaagtgctttaactcttaagactacttctcttggtgaaaatggtttgacgatataatcatctgcaccagactcaaaaccttcaacacggtttgtttcttcacctttagcagtcaacataataatcggtgtttgtttatgttcacgcaatttagttgccacctggataccatccatttcaggcaacattaaatctagtagtatgcaagcataattattctccattgcaagttcataagcctcttggccattacttgcctcatggatttcaaaagattctctttctaaatacattttaagtaaccttctgattctatcctcatcatctacgataagtatttcgttcgacatacaggtcatacctcccacacatgcttttctttacaaaagtattatatcacaggaaagcgcatacagttattaaaaacctaaaattttgtgaaaaaattctcaaactttgtgataaatacatattttatttaattatttcccatgttctgctaaatgacgcatcacttttacttcatgaggcgtcaatacacgtccttcaccagcattcaaaccgacaacatttaaaggcccatattcaatacgagacagtttcgtcacttgatgaccaaaatgttcgaacattcttctgacttgacgattacgaccttctgttattgtaatttcaaccaatgttgtgtttttatctttatcttgtttcttaactttcacttcagccggttgcgtcataccatcttctaattcaatacctttttctagcgctttcacttcttctctcattaagtaaccttttaattttgctacatatttcttcttaatttgatatcttggatgtgtcattaaattagtaaattcaccatcatttgtaagtaataacaatccagaagtatcatagtctaaacgaccaacaggataaatacgcgcttctatatctttaaagtaatctgtaaccactgtacgtcctctatcatcagatacacttgttatcacttgagttggtttatggaataaaatgtaaattttgtcttctagctctattttaataccttcaacttcaatcgtatctgatggcttcacttttgttcctaattcagtgacagtcgtaccattcactttcacttttccttcagaaattaaagtttctgctttacgtcttgaagtataaccgctattagctatacgtttttgtaatcgttctaattctttagtcattattttctcctttttgattgactagattactgaaaaaagcatccatttcttcatcgtcttcttcagttgtcggcaaatcttctatattggaaataccaaatacatttaaaaataaatcagtagtaattaattgttggctacgctgttcattgaccactttagcctcaactagtcctttggcaatcaatgtcttgaccgcaccatctgaattgatactacgaattaattcaatatcacttcttgataatggttggttataagcaataattgatagtacttccattgctgcttgtgataatttcatttgtgacttttgttcaattaattgttcaatatacattgacgcttcttttttagtcgttaaaacatacgtcgttccaaatcgttgtattattaatccatgtgatgaataattttcaattaattctacgagttggtctttcgatatatccaaaatttctaatagctgtttttcatctaaaccttcatcgccagctgtaaataatagcgactctaatataccatgattatccaaaatggtagttcactcctctaataatgttaatatcttcaaaattacgttgttgctcaatattaattattcctgcttttgacatctctaaaatagctaaaaagtgagtgactacttgttcaattggctcagaaaacgtaaacagactaaagaagttaaaatgatctttatctttcaatctcgatgtcacttgttctgtagcttgttgaatggtaaatgtctcttttcggatttcaacagatttaggtgtatttaactcaactctatttttaactctttgataagctacaattaattcagttaagtcaatcgtatgatttggatcccaagattcatctgtttccaaatgagataactctgtcggtctttttgtaaaataaaaatctctttcttctttcatgtcatttaaaatagcagtatattctttataattttgatattctattaaacgcccaactaaatcttcccgtgggtcatcatcaacatctatatctgatgttgattgtggtaatagcatcttacttttaatcattaagagttctgacgctaatactaggtattcacttgcaatattaatttcaagctgtttcattgcatgaacgtactgcatatactgctctgttaatgcttgcataggaatatcataaatatctatttcaaatttttggataagatgcagtaataaatctaatggtccattgaaagcatctaatttaacttcatacataatatctacctcgtattgcgtcatatgtgcataattctctaaaatattatagcatgaaaataacttacttttaaattggggtgataacaaaatgcaacaggcactgataaatttctattatcaatttcatactaagcaacattatttcctatgtcatgacattttagaagatgcatggaaagctgaaaataactacagtaagcaagatgcagttgttagtttaatcttgtttgcaactgcttgttaccattatcgccgcaataatttaaaaggcgcctataagtcttttaataaatctaaagaaataatacaaaatgctaaagatagagatgcgttataccttaatttaaatgattatcagttgttaattgagaaacagattgcaaaattgaatgcagcaaagcctttttcatctgttatattaccaataactccagactttgagcgcatcatcaaggccaactatccagattatgattataatcacgaaacagcaacagatccttttattgtagaccatcacatgcggcgtgatcgttcagaagtgattgcagcaaaagaagaagcgattcaattaagaaaacatagacgtaattaatcaaccataactcaaaagccacaatagcacagacatttttagtcatgtgtattgtgacttttgagttatggttcactttatgctctaggatgaaattggttatacatttttctaatttgagattttgaaacatgtgtatagagttgggtagtagatatgtcagagtgacctaacatctcttgcactgctcttaaatctgcgccattttccaataaatgtgtcgcaaaagaatggcgcaacgtatgtggcgttagcgtctttttaatgtttgcctttacaccattttgtttaatcattttccatattgcttgtcgtgataaaggtttaccatgcatatttaaaaataagacttcagtaacagtcttttttaaaagttgcggtctaatcgtttcaatataagtagttaagtactcaatgactgcgtcgcctaatggcacaattctttctttatcacctttaccaaatacgcgtacaaaccccattattaagttcacgttctctagctctaaatgtatcaattcagatacacgcattcccgttgcgtacagaagttctaacatcgtacgatcacgataaccattaattttatttaaatccggcgtttctaataaagccaacacttcgtcaacatttaaaacgtcaggcaattttttgtcatattttggtgaatctaataataccgttggatctttcgccgcatatttttctcttatagcaaattgatgaaaactacggattgttgaaataaatcgcgcaatggatttagcagattgcccttggtctattaaatgccccaaacactcttgaattaattgtcgatctataaaatcaatatgcgagatatgatgttcagtcatataatcttgatactttttcaaatcacgtctataagcaccaattgtgttagaacttagtcctttttcaatttgtataaaacgcaaatattcttcaataattgtttccataaccacacctctaaaaaaagcgaaggttaatttaacctacgcaatttactatcctttacctttagcttggcacgtttcacacacaccatggaaagttaaacgatgatctaaaattttaaaattgaactcattttcaactcgattttcaacttctggtaacaaatcttcatcgatttcatctacacgaccacattccatacatactaaatgatggtggaaatgttttgcgccttcttttcttaaatcaaaacgagcgacgccatcaccaaagttaattttgtcgacaacttttagttcagctaacaactctaacgttctgtatactgtcgccaagccaatttcaggcgctttgtcttttactttcagatatacgtcttcagcacttagatgatctttttcattttcaattagaactctaacagtagcttcgcgttgtggcgttagcttatatgatgattgttgtaattgttgcttaacgcgatttaatcgttcttccaacgatgtccactcccctactaataattaaaatcattacaaattatttcaaacttcacaattaaaactaacagttttctcaataaaatgcaagcttttctcatttgttatttagaatgattataatttaataataggtgttgcaatgcaatgatagtcttcgcatcttctatttctttattcattagcatcgatttaacattctcaatcggaactttaatgacttcgacaaattcatcttcatctaagtgaactgtgccttcttctacattatccgtaaaatatattgataattgttcatcacaaaaacctggtgaaccatacatatctacaacatgtgttaactctttggcaatatatcctgtttcttcttctaattcacgcttagccgcttcgactctatcttcatcatcttctaatttaccagctggaatttctaacaatggtttttctactggtttacgatactgtttcactaatacgacttcttttttaggtgtcaatgcacaaacagcaactgcaccattatgataaactaattctcttgttgacgtttcaccgtttggtaatgtcactgtatgaatttctacatctacaattttgccattataaataactgttcgatcaattgttttttcatttaaatccattataatcacgttcctttaaattcatattatatattgatacactatgcttgttagctaaagtgtatcgaaaggagaacagacatgcaaaaaaatatattaaaaagtggtattgcattatctgaattaggtctaggttgcatgagtttaggtacagatttaaaaaaagccgaacaaattatagattgtgctgttgaaaatggtatcacttattttgatacagcagacatgtacgataaaggtataaatgaatcagttgttggtaaggcactttttaaatatcaacaacgcgatgatattgtcattggtacaaaagtaggcaatcgtttaacaaaagatggcagtacaacatgggatccaagtaaatcctatattaaagaggcggttaaaggttcactaaagcgtttaggtattgatcatatcgatttatatcaacttcatggcggaaccattgatgatccattagacgaaacaataagcgcatttgatgaattgaaacaagaaggaattatacgtgcttacggtatttcttctattcgcccaaatgtaattgattattatttaaaacatagtcaaatcgaaacgataatgtctcaattcaatttgattgataatcgtccagaatcattattagatgcaattcacaacgatgatgttaaagtattggcaagaggacctgtgtctaaaggattattaacttcaaacagtgttaatgtgctcgacaataaatttaaagatggtatttttgattattctcatgatgaattgggtgaaacaatagcctctattaaagaaattgaaagtaatttatctgcattgacatttagttatttaacatcacatgacgtgcttggttccatcattgtaggtgcaagtagcgtcgaccaattaaaagaaaatattgaaaactatcatactaaagttagtttagatcagattaaaacagcaagagctcgtgtaaaggatttggaatataccaatcatttagtgtagaagtcattttcagtaataaaaacagcagtatgaggcgtttcattataaaaatgccttactgctgttgtttatgtaaaattcgctataatttatgattaagattgctcacttataatagtaattaaagagttgtccttacgcatcagtatttagtaattccgccctgcggcagtgccttaagcaaacttctgccacttcatcttttaataattttattaaaacatctttctatatttcacttcgcatgttaattcatcattattagttattacttgtacacccaacacatttccttgcaacacaagtagtttgaatttttcacaagtataatataatgtactgtctgaaatttggtctacagaaatatcgcttaaaatatccagcactgtaaattcttcaaatactgatagttgttccgcatatcgtacacaaagtcttaccacactctccgattgacagttcattgccatcccacctatttatgctttatttttaaataatttagggaaacatcgttcaaaaaatctaggcgcaatttgatacattttcaacgcatgatgcatccatttaggccgattaatttccaattgttttgttttaatgccataaatgatatcttctgcaagctgattagcatcaagcataattttccccatctttttagcatacttcattgatgggtcggctttttgatgaaaaggtgtatcaatcgggccaacattaactgtcatgatatgtaagtttggtgactctagtcttaaagcattcattaatgcataaaaccctgctttcgatgccccataatgtgcagcatttgcttgtgtagaaaatgcagcttgacttgaaatacctacaatatgtgcgttagatgttaaatatggtctcaacacagtatataaaacattaaaactaattaaattaagctgatacgtttcgatcatttctgaaaaactatggtctgaaatagatttgaaataacctaaacctgcactataaatgaatccatcgaataatgtattgtcttcaaattgcagtgcctgtatcgacttcaaatcatttaagtcacaaggaataacatttatagttttccccaattcctggtcaaagattctagttgctttatcaacatcacgcaccaacaacgttacatgcactttattttctagtaactttcggacaatcgataaacctaaaccactcgtaccaccagtcactataaaatgttgtcctttcatcaattaaccttccttttccattatatagaatgcaatttatcaactttacataattgagacaagttgattatctttcctaatatatatacaataataagaaaatataacatacaaatcaaaaactaaagggatgtgacgttaatgaaactcgtattttatggagctggtaatatggcacaagctatatttacaggaattattaactcaagcaacttagatgccaatgatatatatttaacaaataaatctaatgaacaagctttaaaagcattcgctgaaaaactaggtgttaactatagttatgatgatgcgacattattaaaagatgcagattatgtatttttaggtaccaaaccacatgactttgatgctctagcaacacgcatcaaaccacatattacaaaagacaattgcttcatttcaattatggcaggtattccgattgattatattaaacagcaattagaatgccaaaatccagttgctagaattatgccaaacacaaatgcgcaagttggacactcagttactggcattagtttttcaaacaactttgaccctaaatctaaagatgaaattaacgatttagttaaagcatttggttcagtaattgaagtatcagaggatcatttacatcaagtaacagctatcaccggaagcggcccagcatttttatatcatgtattcgagcaatacgttaaagctggtacgaaacttggactagaaaaagaacaagttgaagaatctatacgcaaccttattataggtacaagtaagatgattgaacgttcagatttgagcatggctcaattaagaaaaaatattacctctaaaggtggtacgacacaagctggccttgatacattgtcacaatatgatttagtatctattttcgaagattgtctaaatgctgccgtcgaccgtagtattgaactttctaatatagaagaccaataaaaacaaacccgccaacacatgtatgcatcatcgcaagcactgtgtttgacgggttatttttataaatttttactatttggcaagcattgtttattactttgtcattagattttaaaactatcaaaatctttcacaaaattaaaattcggcgtatcttcattttgtatcaatgtttgataaatttcatttatatcttctgtattatagcgattgctcaaatgtgtaatcaacgtacgtttaacattggcttcttttatcaatgcaaatacgtcttcaatatggctatgatgataattgttggctaaatgcttttcaccatctatataggtcgcttcatgtaccatcacatcagcatctctagaaatcacacgttcattagaacatggttttgtatcaccaaaaattgctacaattggaccctgtttggactcacctctaaaatcttttgattgataaacttgaccattatgttcaaatgtatcatgagattttacttcttgatatttaggacctggttcaagaccaatgttttttaacgcttcaacattgattgtacctgtagtttcaggtgccattactctatatccatatgatggaataccatgattaagtaaatgcgcctctacagtaaaaccatcatgatgatatgttagatgatcatcgatttcaatatatgtaattggatagtttaaatgtgactctgataaattcatagacatttccacatatgctttaattccttttggtccaactaatgtaagcggcttttgttcaccgccctgaaaagaacgactagaaagtaatcctggcaaaccaaaaatatgatcgccatgcatatgagtaataaatatatgtgtcacttttcctaatttaattgcatgatgtaaaatttggtgctgtgtaccttcaccaacgtcgaaaagccatatggaattggaatatggttctaaatttaaggcgattgcttgtgtatttctctcttttgtaggcaaacctgcactcgttccaaaaaatgtaacttccatatatgcccctccttttcttcaattcattttatcataaaatttgtatcaatttagttttaatttatacttgaatcaaaatctgttaaaaattcgtctttgctagttaatttttctaactttaacgtagacataactatataaattttgataattacgttatacttatcattaataagtatcacattaaacatgatacatgaatcgatatttcatttaagacactgcatactgtcgagcatattgaatgacctgctgaatggattatcttataataataaatcatatatctaattaagaattgaggttttaatcttgagtactaaaaacaaacacatcccttgtttaatcacaatctttggtgcaactggtgacttaagccatcgtaagttgtttccatcaatattccatctctaccaacaagacaatttagatgaacatattgccatcatcggtattggacgtcgtgacattactaatgatgatttccgtaatcaagtaaaatcatcaattcaaaagcacgtaaaagatacaaacaaaattgacgcgtttatggaacatgtcttctatcatagacatgatgttagtaatgaagaaagctatcaagaattattagattttagtaatgaattagacagccaatttgaattaaaaggtaatcgactattctatttagcaatggcaccacaattctttggcgttatttctgattatctaaaatcttctggtcttactgatacaaaaggatttaaacgccttgttatcgaaaaaccattcggtagtgatttaaaatcagccgaagcattaaacaatcaaattcgtaaatcatttaaagaagaagaaatttatcgtattgaccactatttaggaaaagacatggttcaaaatatcgaggtattacgttttgcgaatgcgatgtttgaaccattatggaataacaaatatatttcaaacatccaagttacatcttctgaaatactaggtgttgaagatcgtggtggttattatgaatcaagtggtgcgctaaaagatatggtgcaaaaccacatgttacaaatggttgcattattagctatggaagcacctattagtttaaatagtgaagatatccgtgctgagaaagtaaaagtacttaaatcactgcgtcatttccaatctgaagatgttaaaaagaactttgttcgtggtcaatatggcgaaggctatatcgatggtaaacaagttaaagcataccgtgatgaagatcgcgttgcagatgactctaacacacctacatttgtttcaggtaaattaacaattgataactttagatgggctggcgtaccattctatatccgtactggtaaacgtatgaaatctaaaacaattcaagttgtcgttgaatttaaagaagtaccaatgaacttatactatgaaactgataaactgttagattcaaacctattagtaatcaatattcaaccaaatgaaggtgtatctttacatctaaatgctaagaaaaatacacaaggtatcgaaactgaacctgttcaattgtcttattcaatgagcgctcaagataaaatgaatactgtagatgcatatgaaaatctattattcgattgtcttaaaggtgatgccactaactttacgcactgggaagaattaaaatcaacatggaaatttgttgatgcaattcaagatgaatggaatatggttgatccagaattccctaactatgaatcaggtactaatggtccattagaaagtgatttattacttgctcgtgatggtaaccattggtgggacgatattcaataattgaattaaagcgcacatgttaaacaaaaataaatgagcgaatgacaaggattgattacgaatcaagtatatcaattgttctatcattcgctttttttctagactatattatgaaattatattttacaatgcccaaaactattttaataatcattgaacaaatgggtgtataatttatagaaataatgtagaataaaaataaatgattgaattaattggagtgaaagttttggacgttatcaagcaaatacaacaggcaattgtttatattgaagatcgtttattagagcctttcaatttgcaagaattaagtgattacgttggtctttcgccataccatcttgatcaatcatttaaaatgattgtcggcttatctccagaagcttatgcacgcgcgcgtaaaatgacactcgctgcaaatgatgtgattaatggtgctacacgacttgtagatatcgctaaaaaatatcactatgcaaattcaaatgattttgcaaatgattttagtgattttcacggcgtatcacctattcaagcttctactaaaaaagatgaattacaaattcaagagcgattatatatcaaattatcaactactgagagagcaccttatccatacagattagaagagacagatgatatttcattggttggatatgcacgatttatagacactaagtatttgtcacatccttttaatgttccggattttttagaagacttgctcattgatggtaaaattaaagagttacgacgatataatgacgttagtccatttgaactatttgttattagttgtcctcttgaaaatggtttagaaatatttgtaggtgtaccaagtgaacgttatcctgcacacttagaaagtcgatttttacctggcaaacattgtgcgaaattcaatttacaaggtgaaattgattatgcaactaatgaagcttggtactatattgaatcaagtttgcagttaacattgccatatgaacgaaatgatttatatgttgaagtgtaccctctcgatatttcatttaatgacccattcactaaaattcagctttggattcctgttaaacagagtccttatgacgaagattaaataattaaaaacaaagaagccccctaataaatctataggtctacaaatggccttagattctattagggggcatattaatatgttaatttagttcgataacacatgcttcatatggaagtaactgttttaaattaactttggcatcataattaaatagcttcacttctccatgacttatatcaaatggtacagttaattctgcttcgtggttagtaagattacctacaataagaacttgcttttcatttaatgttctcgtgtacgcaaaaacttgtgaattttcagcatctactaaatcaaattgaccatatacgtatacatcattagactttcttaattgaattaaatctttataaaattgtaatactgaatcctcatcttctaattgttgtgcaacattgatagttttataattcggattcactgggaaccacggttcaccatttgtaaatcctccatttaacgtatcatcccattgcattggtgtgcgagaattatctcggttctcatctttatatttcgcaagtaaagcgtctacatctccaccttgagctttcacaatttgatagtcatttttaacagcaacatcgttaaatgtttcaatactttcaaatggataattcgtcataccaatttcttgaccttgataaatgaatggcgtaccttgttgcaagaaataaactgctgcatgacttgttgctgattcataccaatacttgtcatcgtcaccccacgtcgatacacgtcgtggttggtcatgattttcaataaacaacgcattccaacctttattttcaagttgtttttgccatctatttaatacagacttatacgaatttacatcaaagtgagaatcaccactattccacagtcccaaatgttcaaattggaatatcatattaaatttaccattttcttccccgacccagtcatcagcatcatcagggcttacaccattcgcttcaccaacagtcataatgtcatacttacttaatgagcgatctttcatctcttgtaaccaagtttgtatacctggctgattcatatctacatcaaatgctggggcatatgttttaccctcaggtacaggtaagtcacccgcttcaaacgtcttcttaatatgcgtaattgcatctactctaaatccatcaatgcctttatcaaaccaccagttcatcatttcaaatacagcatctctaacttccggattaccccaattcaaatcaggttgttttttactgaatagatggaaataatattgctcagtattagcatcatattcccatgtagatccattaaatatactttcccagttgttaggttcagagccatctggctttggatcttgccaaatgtaccaatcacgtttgggattgtctttactagatttggattctataaaccaaggatgttcatcagatgtatgattcacaactaaatctaaaataagcttcatacctctatcatgaacaccttttaataaacgatcaaagtcttccatcgttccaaattcatccataatctcttggtagtcactaatatcataaccattatcatcattaggtgatttaaacattggactgagccaaatgacatcgatacctaaatcttttaagtagtccaatttatcaatcattccaggtaaatccccaataccatcgtgattactatcattaaaacttcttggatatacttgatatgctactgcttctttccaccattgcttattcattttaaaactcctttgctatcgctgtgttgattttcttatttttaattctgtatctataatgacgagttcaataacatcctgtgctttattttttaatatatttaaaattgctgcaccagcctgttgacctaacattcgaggcttgatgtcaatactggtttgaggtggtgacgcaatttcggttaaataagaatcattgaacgttgctgtcattacatctttcggaatttcaatattaagttcatataggacacttaaaatcgctaaatgtaacatagcatctaacgaaatgattgcctgtttaatatttgggtccttcaaacgcgtatgcagattttgcatgtaattaaaaataacttctctttcattactagtctcaataatttgataatccagattaaattgtgatgcaactgtttcaaatccttgaatcctgtctttcgaaacttcaaaatcgcctttttctgtaataaatattaattcatctacaccttgttcaataacatgtcgtgtcaaattttcagaagctaatatattatcattatctatatgtgtaaattgatgatctatatccgatgtaggcttaccaatcacaataaatggcatactttcatcaattaacatttgtttaatcggatcattttcttttgaatagagcagtataaacgcatcaaccattcgttgtttaatcattttataaacttcatccattaaatcattcatattatttgagactgtcgtttgtgtaccatagccatgctggttacacgtttcagaaattcctagcaatacattgatgtagaatggattcagtcgaataggctcctcagacccttttaacactaaaccaattttatatgtttggttagtaattaaagttctagcagcggtattaggaaaataattcaattcttccataactttcttcacttttgaaattgtcgcttcgcttatacgttgatttccttttataactcttgaaactgtcgaaggagaaacaccggcttttagtgcaacatctttaatcgtaaccatttaatcacctcctgttaatctctgtactggaaaacgcttccaacctttgtataataccagtttagtcacactttctaaaaaagtcaaaagatttgtgcaaacgattgcataaaacgataaaaataaaaccttcatactgaaattcaatccgaaaatcaatataaaggtttgtataaatattaaaatcgattgtttagtcactaactgcaaaataattaccttggccatcttggaaattaaatacacgttgaccattcatttctactatatcatgcccagttaaacctaaatcatttaattttgagtataatgcatcaaagtttttctctttaaacattaaagatggtgttcctaggttcacctccgggctatacttttcaataaattcttttgccataatcgtcaatgacgtttcagcatctttcgtaggtgatacttcaactgcaacatagtcctcagctaacggtgtttcacttacaacaacaaattctaaaatttctgtccaaaatgctttcgctttttcaacatcatcaacatataacataacttgatttaacttttccataaaatagtacctctatttctctatagtacatgctatcataacacagtaaatattttattacttcacaaaatgcttaaaaatatggcgggatgcttttaaggtcaaagataatacttgtgtaattttttatatgttgtagccacatagaacttcattaatcaaacatgtcatctgggacatatatcaatgaaatacttcgttcaaagttttcgtattttctatgtcaacttaactgggtgtagctcacattgtccattagaatgtataactaacataataaaattaattaaacgtacatgatttgattatggaagttacaatcatttgcgcaatcgaatattattatgttcaaaactttacgctccaataactaaaaagaaagttatacaatgtttagttgcctaacttcctatattgaattcatcagtccaatttgacatagcagccatttttatagttgccatttacatgtgttgctaattaatcatggaagtattatatatagtgctcactgtagaacaggcattaaacaatgccatttctaagtaattatcaacttcatagttttcaagccaataatgaaatactgatgctgaaaaaacatctcctgcacctgtgtcattaattatatttgaactctgttgaacatttttaaatatgcttaattctccatttgtataaaagatatcatcatttccattagtgataactatattttttatttctgaagttttactaatttgttttatttttttataatcacttttagtatttaaagaaacgttccaaaaagcttcagcttcttttttattaaatattaaatagtctatctttgctaagttttttagtatgtttctcaccttctttatagatgctgggattatacctattggaatattactctttccacacaactgaattaaatattgtatactttccttgggaatattagagtctacaaccacacaatctgcattttttattacttctattttttcatttaaatatttgttatttattaagttatatatatccatatctgcaaaaccacatatcatttccccattataatctattacagaagtgaacattcctgtgttcatattttctataatttttatatgttttaaatcgataaacttattagcttcatttaaaatataatcagcttctttatcattacctaataaagttaatagaatagtttttttattacttaatttgccaatattatacgctaaattcctagctacacctccagatacgcttatcgaagatacagggtttgaacttttattaaccaattcagattttaaatataattgtttatctatatttgctgcaccaatacaaacaatattttggctgtttttcattaattttctccttactattcttctactttataaaatctatttttcagtatatataacactaatggtataaataacacagcgctgatcgtaagtgcataaaatccacctttattttcaagtaatatgccgcctaaaaaaaggcctatagctctgaatgcaaaaaccattgttttataaacactattaacacgtcctaacatatgttctgaacatttcttttgcctcagtgtgattatcgctatatttaaaatggattgtgtcatatatgtcaaccctaaaagtgggatgagtataaaaatataagtactaaatggtaacattaatctaaaaattgtatctaaaaataatataattacaattagttttccgaaattaaataatttcaagagaaaacttgcagataatgaaccgattagcgcacctaatgatgagatacctaaaactaaccccaatgcttgagatgattgattcatgtcttcctttacaaacattactatataaatataataaggtgagataattagattggataaacttacaacaacagccattactctaatagttgaattagataatagataatcaaatccaactttaacatcgctcaaaaaattttttccactcaacttttcttgattgaatatactctttgtttcaattttaattaatatcaaactgaaaaatgagagtaaaaaagtcatagaatctataaaaatcaatattgaatatcccatatatgtataaagtaaacctccaattatagggcccaaaaattccgaaacattttgagtagcgtatatataactgtttgcgctcgccaaatcttcttcttttacaatacttgggattatcgaaacctcagaaatactgtgaaatactaatccaatacctgaaatgattgcaactacataaatttgaaagatgcttaacatattataaaaacttaatactggtatacttaaatatgaaatgagcctaattatatcagcacatttcattatggtcttcttattcaatctgtcaattaaagcacctgctggcagtcctaaaattgcataaggtataaaacttagtgcagaaactatgccaacttgaaatgcagagccagtaagctttaaaatcattaacggaaaaacaaacgtagtaaaagcactgcctatgttagaaaaagctatccctattaaataaaaagtaaagttcttattaaacaatacagaagcatatgacattctatccctcttcttcatcaaataataaaacgtaatctatttatctaaatattaaaattattaactaatgctatcttaatagtatgtaagtaaaacgtctacacttaaacggacaaattctatgaggatagatatcgttaatttataaaagttaaaaattttaatttgacaagagaaagaaaatcattgaatatatcatgcgtagtaaatttcgataaatacataaggaaagagacaatttctatcaaataaataatagaaattgtctctttaacattacctaaattcataaggtctcaggctcaatagtcaatattattcttcaatccattgtgtatggaatacgccttctttatcttttctttcgtacgtgtgagcaccgaagtagtcacgttgtgcttgaattaagtttgcaggtaaatcagctgcacggtaactatcatagtaattaatacttgatgagaaaccaggtgttggtacaccattttgaacaccagttgcgacaacatcacgtaacgcatcttgatattcagtaacgatgtttttaaagtaaggatctagcaataagttttgtaatccaggattattatcgtaagcatctttgatcttttgtaagaattgtgcacggataatgcaaccttctctccaaatcatagctaaatcaccaagttttaaattccattcattatcttcacttgctttacgcatttgcgcgaaaccttgtgcataggaacaaattttactcatatataatgctttacgaattttttctaaaaagtctttcttgtcaccatcaaatgatgcttttggaccatttaattctttagaagcatttacgcgctcttctttgattgaagagataaaacgtgcaaatacagattcagttatgattgttaatggaatacctaattctaatgcgttaattgaagtccattttcctgtacctttttgacctgcagtatcaagaattttttcaactaatgcttctttattttcatctaatttcatgaaaatatcaccagtgatttcaattaaataactttctaattcaccagcattccagtctttgaacgtttgagcaatgtcttcatgagacatgcctaataattctttcatcatagcataactttctgcaattaattgcatgtcagcatattcgataccattgtgtaccattttcacatagtgtccagcaccatttggtccaatataagtaacacatgaagcaccgtcttttgcctttgcagcaattgcatcaagaatatctgcaactttgttataagcttcttcttgtccacccggcattaatgacggaccagttaacgctccaatttcaccaccagaaacgcccataccaataaagttgattgcactttgtgctaatgctttattacgtctgatagtatcttgatagtttgtattaccaccatcaattaaaatatctccatcatctaataaaggtaacaaactatcaatcgttgcatccgtagctttacctgcttgaaccattaataaaattttacgtggtttttctaaagaattaacaaattcttccaatgaatacgttggatgaatatttttcccttttgattcttcaaccattaaatcagttttttcacttgagcggttaaatacagatacactatatccgcgtgattcaatattccaagctaggtttttacccataacggctaaaccaataactccaatttgttgtgtcatattacttacctcacttgttgatttttcattagtattgtatcacaaaatagacatacactacactaaatcatttcgattgtcgcgcaactattttgattatttctaacacttgacttgcaagcaagttcaatgatttaatcggcattctctcatttgttgtatggattttttcataacccactcctaaaatgactgaaggaataccaaatgtattaataatactgccgtctgaaccaccaccagaaataattgtatttgcagataatcctaaattacgagcactttcttgtgcaattttaacaaccgtttcattatcattaattttaaatcctggataactttgctccactgtaactactgctttcccacctaattctgatgcagtagtttcaaacacatcagtcatatgtttgacttgtgtttttattctttctggatcgtgagaacgtgcctctgcttctaaaatgacttcatctgcaacaatattcgtagctgaaccgccatgaaacttaccaatattggcagtagtgatttcatcaacttgtcctaatttcattcgactaattgctttcgccgcaatattaatagcactaacaccctcttttggcgtacttgcatgagccgttttgccaaaattttagctgaaattaacatttgcgtcggtgcacctacaaccgtagtaccgacatcagcacttgcatcaatagcataaccaaagtccgcgtccaacaactctgaatttaattctttagcaccaattaaacctgattcttccccaacagtaatcacaaattgaatttgtccatgtgggatttgttgttcctttatcacttgcaaaacttcaagcatagctgctaatcctgctttatcatctgcacctagaatagtcgtaccgtcagagtatatgtagccgtcatcttttacaattggctttacattaattgcgggtacaacagtatccatatggctcgttagatataatttaggtacttcgccttcttcgatagtacttttcattgtacacactagattattggcacctaatttaggatgtttagccgcttcatcttctttaacatctaaccctaatgatatgaatttttcttttaaaataggttggattgttgattcattccctgtctcagaatcgatttgtacaagttctaaaaacgtattaagtaatctttgctcattaatcataatggaaccccttttatcaaaattttcaagtacgccaaacggtaaaaattgatgaattaaaatgttacagtaattgacgttacacagatttatcaggcttgtaaattgtgtcatattattttcaatttaatatatatatttattgtaactcaaactaagctttgtcaaaaatatattgattgatttttcaaagatatcgtataatgaggaaaatgacataagcaaacttactcatgttttttataatattcctttatgatgattgctagttatatcgtctcaagttaaaaattttatatcttatgtcgtaattattaatacaaaggttattcatttggaggcacacaaaatgcaaaataaagttttaagaattatcattatcgttatgcttgtatcagttgtattagcattgttattaacgagtatcattccaattttataaaccatatctcaactacctatacaaaatcatacaattaaaaatccatccgttataaacgcatgtattaataagttatcgtattgcaacgattactttcaaacatgggtcatacggatggattattttttaagctacttcactatgcattttcaatgaaccaaattgcgatttgatttgtaaatattcttctaattcatttaatatttgaataatacttgctctcgagttaagcgctttgtgtgttgttggcaatggcagttcatccaatttcaaacgcgtctcatacaaattgtgtaaacgcattgctgtatagtcattactattcacatttagaccaatttctttcagcagtgacgcaacatcatttaaaagtggatctttatgacagatactttcgatgagcggtttcattctcattaacaattccacttgctcttctcgcatatcaaaataatgatagtatgaattttcgtttctaacaaaatgatttttaacatctcggaacgcgatagacttcgcctttttaatatttaaaagtaacgcttcaaattcaatcgcaatggtatcttcatatttttcacaaatataactatatttactaaaaatatcagcaatttgttgctcaattttacatttgtattcgtctagttgtttgtctaaacttggcatcattaaattcattgtaaatgcaatgcttagtccaattaacagtaataatgtttcattaacaattaaatgtgcatcaattgattttgcattaaaaacatgaagtaatataacgcaactcgtaatgacaccttcttgtacttttaatacgacagttaatggtataaataacaatacgataataccgagtacaattggactctggcctaataaactaaatattgctgaacctaaaaacaatactaaaaaacatgatactaatcttgaaataatcgcttgtagcgaatgtacttttgtatgtttaatacataatacgactaatatggcacttgaagcataattatctaaacctaacagcttactaataattacacctaaagtcatacccactgctgtttttattgttctaaatccaatcttgtaaggatttaactttaacatgggttagcgcctcttatctttcttcacaatatttattgaataatgtttgtaattgattaattacgttcatcacatcatgaccttcgatttgatgtctttcaatcatttctgtaatatttccatcttttactaatgcaaatgacggacttgaaggcacataaccttcgaagtattcacgcgctctttgtgtcgcttctttatcttgtccagcaaatactgtcactagacgatcaggtaatacgtcataatgtaaagcatgtgatgctgctggtcttgcgataccacctgcacaaccacatacagaattgatcataactagtgttgtaccatcttgtttaagaactttgtcaacatcttctgcagtagttaattgctcatatcccgcagattcaatttcattccttgcttgttctacaacaccgttcatgtataaatcgaaattcatgtccataagttcaatcacctatccctttatatttaaactatcctcattctactaattaataacatattgttcaataaactaatctgaatcacacctatatttagacacaattttaacaatataccaaacattattgtgcttaaaatcatggaaactaatttgttcacctgttttctttaatatgtttcaagtacgatgtcttattttgactttactgcaaaaatgcattcaaccatgttgattattgttctttatctttttttgaatatattgcaaatattttattgccaaaaaaatacatccatcgacaagaacaagataaaacaagttgtcgatagatgcatctatgttatcactaatatatatttgtattttctaaagtatactgttcgatacgctgtttaatatgattcataaatttacctgtttgtaaaccatctaaaatacgatgatcaattgaaatacataaattaaccatacttcgaattgcaatcatatcattaattactactggctttttaacgattgattctacttgtaaaatcgctgcttgagggtgatttataatacccattgatgatactgaaccaaatgtaccagtattattaactgtaaatgttccaccttgcatatcttcagttgtcaattgcttattacgcgcttttgttgctaaagtattaatttctctagctatacctttgattgacttttcgtctgcatgcttaatcacaggtacgtataatttattttcatcagcaacagcaattgaaatattaatgtctttatgtaagacaatttcatttccttgccagctactatttaataatggatatgcttttaaagcatctgctacagcttttacaaagaaagcaaagaacgttaaattatatccttctttatttttaaagttgtttttataatggtttctcgtattcacaaggtttgtagcatcaacctcaatcatcatccatgcatgtggaatctccgttacactattaaccatgttttgtgcaattgctttacgcacaccatttactggtattgtgctattttcactatcgtcttcagatgattggttacttgatctatctactgaagttgattgtgtttgaacttgtttgtcagattgagctgtggtaccaccattttcaataactgacattaaatccttcttagttacacgaccttcaaatccactacctacaacttgtgataaatcaatgtcatgctctgaagcgagtttaaatacaacaggtgaaaagcgaccattatttcgtggttgattttgtttagaagtagatgtctgttccactgttgaactagcttttttagtagatttctgagtatgctcatccacttttgcttgtatctcttcagttgtttcatttgtcttttcatcagcagtttcaattttacagataattgtatcaatagctaccgtctgccccgcttcaactaaaatttctgtaattgttcctgatatcgtggaagggacttcagccgtcactttatctgtaataacttcacataatggttcatattcatcaatatgatcaccaacagaaactaaccattgttcaatggtaccttcatgaacactctcacctaacttaggcattgttatttccatgactttccctccctagaattctgctaattcacgcattttatttaagattttttctggattcatcataatttcattttctaatacaggtgaaaatggcatagatggtacatctggagcagctaaacgcatgattggtgcatctaaatcgaacaagcaatgctctgcaataatcgctgacacttctgacataatgctaccttctaaattatcttcagtaacaagtaaaactttacctgtatgtttagcacgatcaataattgtttctttatctaatggataaacagttcgtaaatctacaacttcaacattgataccgtctgctgctaaaatatcagcggcttgtaaacaataattgaccattaatccataacaaaatactgttaaatcttcaccttcacgtttaacatctgcttttcctaaaggtacagtgtaatattcttctggcacttcttcctttaagaatctataagcctttttatgttcaaagtataaaacaggatcatttgattcaattgaagataataatagacctttagcatcatacggtgttgaaggtataacaattgttaaacctggtgatgaagcaaatatactttcaatactttgtgaatgatatagtcctccgtgaacaccgccaccaaatggtgcacgaatcgttaatgggcattgccaatcattatttgaacgataacgcattttcgcagcttcactaataatttgatttgttgcaggtaaaataaaatctgcaaattgaatttctgcaattggtcttttacctaccatagctgcaccaatggcagttccaacaatatttgactcagctaatggcgtatcgataactctatcttcaccatattgttgttgcagtccttgagtagtaccaaatacgccaccttttttaccaacatcttcaccaagaataaatacatctttattttgttgtaaagctaagtcttgtgcctggcgaatcgcctctaaataagataatttagccattagttaagactcccttcttcgtacacaaatgcataggcttcttcgacacttggatatggcgcgtcttcagcagcctttgtcgctttattgatgatgtctttatgctccgcttctatttctgccaaccaagcatcatcgataatgccagctgaaagcaactcttttttgaacttttcattgcagtctgcttttttaagcgcttcacgctcttctttcgtacgatattggtcgtcatcatctgatgaatgagctgtcatacgacttgttactgcttcaatcaaagttgaaccttgaccagaaatagctcgatctcttgcttctttcatcgctttatacattgctaatggatcattaccatctacttgttcaccatgtaaaccgtaaccaagtgctctatccgataatttttcagctgcgtattgtaatgaatcaggtactgaaattgcatatttattatttataatgacacatacaaaaggaagtttgtgtacacccgcgaagtttaaaccttcatggaagtcaccctggtttgaactaccttcaccaacagttgctgttgcaattttcttcttaccatccatttttagagctaaagcagcaccaacagcatggggtatttgagttgctaccggtgaactttgtgacaaaatattcttagctctactactaaagtgtgatggcatttgttttccaccagagttaacatcgtctttctttccaaacgctgataaaaacgtatcatacgctgatatacccatataagtaacgaaagctagatctctataataaggcgcagtaatatcaccttcttctaatgcgtatgccatcccaatctgagttgcttcttgtccttgaccacttacaacaaatggaattttacctgcacggttcaataaccacagtctttcatctatttttctacctaaatccatccatttatatattacttttaggtcttcttcgctaaggcctaatgatttataatcaatcatgttaaatcctcctatttatacgtgaatagctctactttctgctttcaatcctaattccatcaacacttcagagatggaaggatgtgcgtgtgttgttagtcctaattctaatgccgagccattcatgaactgtaacagtgatgcctcattaatcaattctgttacatgtggaccaatcatattaatacccacaatttcttcagttgattgatcaatcaccatttcgctatacccttcgtttgcgtcatggctatcaatcactgctttaccaattgctttaaatggtactttaaaacttttaactttcattccctctgcctttgcttgctcaatgtttaaaccgatagaagcaatttcaggttgtgaataaatacacttaggcatcatgttatagtttactgggattgggttcccttcaaacatatgatcgacagccacaacaccttcttttgatccaacatgtgccaattgtaattttccaatacaatcaccagctgcataaatatgtttatcttcagtttgttgaaattcgttcgttaaaatatgtcctgatgttgaaagttttattttagtgttgtttaaaccaatatctgatgtgttaggttttctaccaatcgatagcaacactttatctactttaattatgtctgaggaaatttcaaatgtaacaccatcttcgttaacattgatatcattttcagaaagttttattccctcatagaatttaacaccacgtgctgacaatgatttttttaatagttgtgaagcttgtttactttcagttggtaaaattctttcaccagcttctataactgttacgtcaacacctaaatctatcatcaatgatgcaaattccattccgataacaccaccaccaataataccaacacttgatggtaacgtctttaatgataatatatcatcgctagataaaattttatcatgatcaaatgataagaatggcaactctgcaggcgaagaaccagttgcaattaatacaaattggttgggtaataagtctgattcaccatcttcatattcgacagatattgtgccactttgaggtgaaaatatagatgtacctagaatacgtcccgtgccattataaatgtcaatgtgattgtgttgcattaaatgctttacaccttgatacatttgattaataatgtcttcttttcgtgccaacatattttcaaaattaacattagcatctttgacatcaacgccaaacattgctgcctgttttactgtttgaaatacttcagcagatttaagcagcgatttagtaggaatacaacctttatggagacaagtacctcctaatagttgtcgttctactattgccacttttttacctaattgagacgcacgtatcgcagcaacatatcctgcagtacctccaccgagaacgactaaatcatattgtttctctgacatgttcttactcctaactaatgatatatatccattgaaaatttattaatacatagttttcatgtccattaattacctattttacatgattgtctatttagtttgaatgcacataaataaatccataaatgagtattcaacacactttggaaattatctatgtctttgattgtgttgtatcatttctcttgcattttcacgagttaaatcagtaacacttgcacctgaaatcattcgtgcaatttcatctactttatcatcgccaattaactcttgaacttgtgttgttgtacgatcatcttttgatgatttcgaaattaataaatgatggtcgctcatcgatgcaacttgtggcaagtgagatatacaaataacttgtatatattctgctatatctcgcattttctctgccattttttgtgcggcttgtccagatacacctgagtcaacctcatcgaataaaattgcagtttgacctctcgatttaacaaaaatactttttaacgctaacataattctagaaagttctccacctgacgcaattttatttaagctttttaatggttcccctttattaggactgattaaaaattctacaaattcgattccatcaatattcggttcttctaattttttaaatgaaatctcaagatttgcatctttcatttgtaagttttgaatttccgatacaatgtggtctcttaactccctagcaactatacgacgctgcttagataacgcttgtccaacctctataacttgattatacaatgcatttatttcttctcgtaactgcgatgtactttgttcatagttttcaattttattgatttcattattaagtttttcttgatatgcgattaattctgaaatatcttttccatatttgcgttttaaattattcagcaaattcatacgagattcatactcatttaacacttgttcgtcgaattctgtattagccatttcatcatataactcatgttttgcatcttctaaaatgtaataaaattgatcaatatcttcttttaatttgtcatatttgtttggaactatatcgtttattgttaacaaatggttgcttagttcatacaaacgatcagtgatagcattttcatccgttaatgtcatatgtgcgttattaagagctaagcttaatttttcagagttttgaatgcgtttaatatctatttcaagttgctctatttcgccttcttttagatgtgcttcagacaattcttctaattggaatttcattaaatctaaacgctgcagcaatgcttggtctgctgattctaaatcttctaactcttgctttttggctttataattttgaaaagtttggtgatatttatccaacaaatcttgataacgtgattctgcgtaattatccaataatgttaaatggtatttttgtttcaacaaagattgcgtttcatgttggccatgaatatctaataattcttgcataacttttcgtaaatcttgtaaagtaactgtttgattattaattttacaaagacttttaccagagctgaaaatttcccgtttaactaataaaaaatcttcatctacatcaatatccatatttttcaatatatgtatagcatctttactctcgtcaatatcaaatataccttcgatgacagcctttttttcaccatgtcttacaaaatcagatgaagctctcattccaattaattgtccaattgcatctataataattgacttacctgaacccgtttcaccacttaaaacagttaaaccatcagaaaattgaatttctaactcttcaataatagcaaattgcttgattgataaggtttgtaacataaactcatcgcatccttataacaaattgaaaattcttgacttgatttcatcacttgcctctttgcttcgacaaataattaaacaagtatcatcaccacaaattgtgcctagtacttcttcccaattgatttgatctaatatagctccaatagattgtgcattaccaggtaatgtttttagaacaagtaaattatcagtaccatctatattaacaaaggaatccattaaataacgtcccaatttttctaaaggatggaattttctatcatttggtaaactataaacatattgacctgaaggtataggtactttaataagttgtagttctttaatatcacgagaaacagttgcttgagtgacatttaaatcataatcgtttaatcgtttaactaattcatcttgtgtctctatctgttcatttgaaataatttctctaatttttatatgcctaaccgattttttgggcacagtaaacacctctgattacgaatatttatacatttattttaacacatgcactgatttacgactactaaacacctttacgtaaaaagggtaaacatggtttatctatcttgattatctatttataaatatttttcatattacgcataacaattgcttaaaatatgtataaaaatgaatatatgtgtaataaacttgctaattattagatttaataagcgtcaattgtttgaacatatttaattaaaatcacattgatatcacagatgcgaatattgtcgtatagaaattgaaaattctatttttagatgaaagtctttaacataattttaagtttcaacatgagaaaaatcgattaacaaacaacgtcagttgaatatgccttttgagacatttcaaacttaacaattgttgctaatcgatatatttgcttttagtgatccctgctataaaataaatcaacgatttctaataagtgttttgtattgaattgttcatcaatttgcattagttcatccactgctgcgtctctatgataagtcaatttatcttctgcgccatcttttcctaataaactcacgtacgtacttttattattttcaagatcgctgcccacttttttacctaacttcgcttcatcaccatagcagtctaataaatcatctttaatctgaaacatcatacctaaatgataactataactttctaaatgttctttagttgcatcatcgacattagcgatatctgctgcactcataaccgcaaaagttaatagtgctcctgtttttgttttgtgtatcatttccaaagtttcaagatcaattggttggccttcgctttgcatatctaacatttgaccgccgaccattccaacatgaccacttgctattgacagccgttgtagaacttttatttttacttcatcagttaatctatcatcacttgaaataagttcaaatgctttagttaataaagcatcacctgctaatatcgccgtccactcaccatatactttatgattcgttaatttccctcgtcgataatcatcattatccatcgctggtaggtcatcatgaataagtgaatatgtatgaatcatttctagtgcaattgcgctcttcatacctaactcatactcggtatttagtgaatctaaagtgagtaataacagaactggtcggatgcgtttacctccagcatttaatgaatacaacatactttcttctagctgagtattcattactgatttatttatcgcaaccgataattcattattgacttcatctattaatttattcatcggtagattcgtcattttttacatcctcagcttcttcttttattaagtcattcacctttttttcggcattttttaaagttgtgtcacaagctgctgatagtttcataccacgttggtataaatctaatgattcctctaaagatactgtttcattatctaatttttgaacaattcgctctaattcttgcatcatttcttcaaaactttgcgtttctttagtcattattacaccttactttcgtaacttttgcatctactaagccatctttcattgttaacgtcaattgatcattttctgttaaatctttagtactcgtaatgacttcgtcttttttattaacaattgcatatccacgcaacattgtattagttggacttaaattgtttaagttttctactttatttttcaaatcatttttataacttaatatcttagaattcaataatttaacaagttggtttgtcaattgaagattattttgttgttcttgattaacactacttagtaacgcttttaaattatagcgttgctgcaacagcattaatcgatgtctctgttgttcaaaagttgcctgaatttgttgtttcagtctcttttctaaatcatcacgacgttgtatctgttgatcatacaataaagttggttgtttaaacttgtaatacgatgacaaatgttcaacatgtttacgttgttgttctaaatgtttcttgatgaaacgagtcaatgtaaactgatattgctgtatttgttgcagcaattcatattggtctggtgttgcaataacagcagcttgagttggagtcgcagctctgatgtctgcagcaaaatcacttaatgtaaagtctgtttcatgacctactgctgatataatcggtgtcttacaattatatattgcacggacgacagcttcttcgttgaaattccataaatcttctatggatccaccgcctcgacctacaataatggtatctacacctaaactatctgcatattcaattttttcaataatgtcgtcttttgctttttcaccttgaaccaaagtactaatttgtatttgttcagctaatggaaaacgactatttatcgttgaatggatatctcgaattgcggcacctgtactcgctgttaaaactgcaatttttttaggaaacttaggtattgatttcttattcgctttatcaaaacaaccttcttcagttaattttttctttaatgcttctaatttttgatataagttccctataccatctaattgcattttatttacataaatttgatagtttccacgacgttcaaaaacagaaacacgtgcttctaataagacttcatctccttctttaggttcgaagtttaatttagaagcactacctttgaacatcatggcacttataacgctttctttatctttcacattaaagtataaatgaccacttgaatgctttttgaaatttgaaagctcacctttaatcaatacagattggagatgtgggtcttgatcaaatttatatttaatatatttcgttaaagctgaaacacttaaataatctgacatataacatcactcaattttatttttttatattactcaatacaccatttataaatttataatgatcatcatcactgaattgttttgttaattcaactgcttcattcattacgactttagcaggtgtatcactgtgtaatatttcatatgttgccattcttaaaataatacgatccgtttttaataaacgtgcaatagtccaatcttttaaataaggactaattgtctcgtctaatacaggttcgtgatctttaacgccagaaactagccaatgaataaattcgaagtctaaatctggattatcgtctttaataaagcttatcgcttcatttatcgttaaatcactgtccttcatttctaattgaaataaagtttgaaaagcttgcactcgggattctttacgactcatttttaactccttcaaacgtttgtatttttctttatttaattactgaattaggtatgacattacttttcaataacgatttgtgtaatgtgaatattaatttgcttaggttctatcgctgtcatattagaaattgaattaaaaattgacgtttgaattttgtttgcagtttttgaaatattaacaccatgttttaatgcacaatatacatctatatatatgccatcttctttactctcgatttttaaatcacggcttaaatttttacgactaactttttctaaatttgtttcttttaattcagcaaaatggccagtgatgccttcgacttccgaagtagctatacttgcaataacagatagcacttctggcgctatttctactttacctaattttgaatttgaataatcagttactttgaccatggattgacctcctattaaccttcatcattcataatgctattttgctctaaaaagtttgtattaaatttaccgcttctaaatatatcgttattcaataatttaatatggaatggaatagttgtatcaataccaagaaccacaaattcacttaatgcacgaatgccagccataatcgcttcatctcgtgtcggttcatgtatgattaatttcgctaccatcgaatcataatatggcggtatcgtataattagtataacatgctgactctattcgaacaccatatccacctggtgcaagatattgctcaattttacctggtgatggcataaagttcttgtaaggattttcagcattaattctaaattcaattgcgtgtcctgttaatttaatatcttcttgtttatacggtaacacgtcacccatagcaacttgtaattgtaatttaactaaatcaattcctgttaccatttcagttacaggatgttctacttgaatgcgtgtattcatttccataaaataaaatttattatcatttaaatcatatataaactcaattgttcccgcattttcataatttacagctttcgctgcacgaactgctgcatttcccatttcacgacgtgtttcatcatctaaaattggggaaggtgcttcttccactaatttctgcatacgtctttgaattgtacaatcacgttctcctaaatgaattacattaccatagctgtccccaacaatttggatttcaatatggcggaagttttcgatgaatttctccatataaagtccaccattaccaaatgcagtttgtgcttcttgttctgtcattcggaagccagtttcaagttctttttcatcacgagcaacacggataccttttccgccaccaccagcagtagctttaatgatgaccggataaccaatttttttagcgattttcttagcttctgagacgtctttcattaaaccgtcactaccaggaacaactggaacattggctttgatcatttctgccttagcaacatctttgatacccattttttggatagattgataacttggtccaatgaacttcaattggcatgcttcgcataattctgcaaagtcagcattttcagctaaaaagccataacccggatgaacgccatcacaacctgtagaagttgcaatagataagatgttcggaatatttaaatatgaatctttagacaaagtgggacctacgcaatatgcttcatcagcaatttgagtatgtagcgcatctttatccccttcagaatagattgcaacagtttggatgcctaaatcacgacaagcgcgaataatcctaactgcgatttcaccgcggtttgcaattaaaacctttttcattatttcaccttaaataacggttggccatactctaccatttgtccgtcttctactaagatctcaacaatttcacctgaaatttctgcttgaatttcattaaatagtttcattgcttctaaaatacacactgttgtttcatttgaaacagtgtccccaacttgcacataggcttcttcgtctggagatggcgatttgtaaaatgtacctaccataggtgcattaattgttttgtgattatctgaagttggctttggagcttcagttttattgttatcagttgattgtacttgaggcataggcattgccgcagcttcaactggcatttgtgagatttgtggcgtgataatctcagtttctttttctttcttaagcgtcactttgcctttagtatcttcaatattgatttccgttaaagttgatttatccagaatttcaattaattctttgatttctttaaagttcattattactgactccttcagtttgttttcatctacccgtctattttacttgagacaactcttcaattcaagcatgttcatatcgcaggcgacattataggtctatctcaaagttataataaaaccacattttaaattaaaaacacttgtggatttattacttaacattgactcatcttaactcttgattaaaaattttatgcattcagttaaacatatcaatgttatttttattagctattatttcttatcctcaacaatatgatatgtagatatatacccttactcatgtctatgtttttttactaccaattagacgattcgttttatattttaaaatttattttaaaaataaaaagcctcatatcagcatataacctataatcattttaggcaatagctttatgagacttatttggaatatcttacgttaaatcagtatagtgaatacaagctatttgttaacaaattagagattatcctcttgaaatgtagcttccatcaccagtgttgataattaaaacgtcaccttcgtttacaaataaaggtacatttaatgtataacctgtttcaacagttgccgatttagtagcaccggttgcagtatcacctttaataccaggttctgtttcagttactgttaattcaacagttttaggtaattcaacaccgatagtttcaccttcgtatgtttgaatttgtacttccataccttcttttaagtaattcaattcttcttttaagtaatcacttgaaagttctgtttgttcaaagctttcattatccataaatacatgattatctccgtcagcatataaatattgcatgcgacgattttcaatcattgctggttcaactttttcaccagctctaaacgttttctcttgaattgcaccagttcttaaattacgtaattttgaacgaacgaatgctgaacctttaccaggctttacatgttggaagtctataactttccaaatagcgttatcaacagaaattgttaaacctgttttaaaatcattaaccgaaatcattcagtttcctcctcattttacacgcttatgttaaaactataaggtcttttgtgcatttagtaaagacttgacaaccattttctgtaattaaaatatcatcttctattcttataccgcccaaaccttctatataaacaccaggttctactgtaacacagttgttaacttgaagtttatcttgtatcgtacgagccagcattggcccttcatggatttctaaaccaataccatgtcctagtgaatgtccaaattcttttccatacccttttgactctaaatagtttcttgaaatggcatcagcttctgcaccagtcatgccaggtctaatctcattaattgctttcatttgagattcaagtactatttgatatatttctttcagtttaggatctggttctccaatagcaaatgttctagtaatatctgaacaatatccattgaaataagcaccaaaatccaatgttatcatgtcgcctttttcaataattttgtcacttgcaacaccatgtggtaatgcacctctatgaccagatgctacaatcgtatcgaatgatggtccatctgctcctaattctagcattttactttctaatattgcctttaattctttttcagtcataccagcttttgcaaccgttagtatgtattcatatgtttcatcaacgatatctgctgctttttgaatcaatgcaatttcgtcagcatcttttacgtctctaattttatctacagtattagaaatgcttattaatgatatacggcttttatttaattcaaggtatgtatcataactcacatggtgcccctcaaagcctacattttcaaaattctcttggtgtagcaattctttaatctcaccaatgatagtagatttacgattaataatttcataatttggcgcctgcttagttgcttgatcaatatatctaaagtctgttatcaaatattgtttatctttagatatgataagtgctccactggtaccagtaaaacctgataaatatcttctattgtaatccgaaagaatgataatcgcatctaaatgtttttgttctaaaatacgatgcacttgtgttattctgctcatcttattacctcctagtgaaacgtttgtgcatttcaactttatacattaaaataatatcataataaggataaaaaataatagatattgattttagggagatagtaatgaaaaaattggtttcaattgttggcgcaacattattgttagctggatgtggatcacaaaatttagcaccattagaagaaaaaacaacagatttaagagaagataatcatcaactcaaactagatattcaagaacttaatcaacaaattagtgattctaaatctaaaattaaagggcttgaaaaggataaagaaaatagtaaaaaaactgcatctaataatacgaaaattaaattgatgaatgttacatcaacatactacgacaaagttgctaaagctttgaaatcctataacgatattgaaaaggatgtaagtaaaaacaaaggcgataagaatgttcaatcgaaattaaatcaaatttctaatgatattcaaagtgctcacacttcatacaaagatgctatcgatggtttatcacttagtgatgatgataaaaaaacgtctaaaaatatcgataaattaaactctgatttgaatcatgcatttgatgatattaaaaatggctatcaaaataaagataaaaaacaacttacaaaaggacaacaagcgttgtcaaaattaaacttaaatgcaaaatcatgataggagtcttttaatgcgtaatataatattttaccttgtacttataattgctgcgattggattagtaatgaatctagatgcctttattttttcaatcgtcagaatgttagtaagctttgctgtaatagctggtattatttatctgatttattatttcttcatcttaactgaagaccaacgcaaatatcgcaaagcaatgcgtaagtataaaagaaatcaaagaagaaaatagataaaaaaatggaagcacttgtagttaaaatagtctacgtgcttccattttttattctaaaaactactttctaaacatccattcatctgaacgatatttttcagttaattcttccacttctgccaattgaacttctgttaattcaagtggctttaattctatatttaaacctttcttaaaacctttctcgaaagcttcttccatttgactaatagtaatgtgttcatctgaaatatcattgatggcaactgctttttcaacgaatgcctctttcatttttaattttaatctttcatttttataaataaacatatcaaacaattcgtcaatatcaatatcttgtaaaatcgaaccgtgttggaggattacgcccttttgtctcgtttgagcactcccagcaatcttacggccttcaacaactagctcataccaacttggtgcatcaaaacacactgaacttcgaggttgttttaatttttgacgctcttcaggcgttttaggtaccgcaaaataagtatcaaatcctaagtttttaaatccttctaataatccttgtgaaatcactctgtacgcttctgtaacagtagaaggcatattgggatgcgattcaggcactatcacactgtaagttagctctttatcatgaagcaccccacggccaccagtttgacgccttacgagaccaaaacctttctctttaaccttatcaatatcaatttctttttgtagcctttggaaataacctattgataatgttgcaggattccatgtgtaaaaacgtataactggatcaatttcacctctagagacaaaatttaataacgcttcatccattgccatattataatatgggtctttacttcctgtattaataaaattccaagtttcagtcatattcaagaactcctatcagcaaaatgtataatatttgattcgctaattaatcaatttaactaaatgaataataattgcaattctttagtgaaatattttgataatttgacctaacagtcttataattatattatcgtttaattagggaggatgcaagatgagtgctagtttgtacatcgcaataattttagttatagcaattattgcttatatgattgttcaacaaattcttaacaagcgagctgttaaagaattagatcaaaatgaattccataatgggattagaaaagctcaagtcatcgatgttagagagaaagttgactatgactacggtcacattaatgggtctcgcaatattcctatgacaatgttcaggcaacgattccaaggattaagaaaagaccaaccggtatacttatgtgatgccaatgggattgctagctatagagccgctcgtattttgaaaaagaatggatatacagatatctatatgttaaaaggcggctataaaaaatggactggaaaaataaagtctaaaaaatagttttgtaaatttaatatacgatttaataaaatctgagtgttaattgatcatcaataacaatactcagattttaattttttaacaaaggattttaattttttaacaaagactgttactatatttctctagcttcacagatcattaaatttagtttctgcataataaagagagttcaactcattttcaatacgattcaattacctcaatctaaaaagtgaaaagacaatttctatgaaagaataataccaaaccctaagagttattacttcggtttagttttctttttcaaatagaaattgtcttttttaattgattttaaaaccattatccttaaatcttcatacaaagttagaataataattctcggaatatgtgtttaacaccttatttttcctgtttaagattttcaaactttaatattggtttacgagcagctgtagcttcgtctaatcgatcaatcacagttgtatatggtgcttctaacactttatcaggatcatttttagcttcttcagcaatactaattaatgtatcgataaaataatcaagtgtttctttagactctgtctcagtcggttcaatcatcataccttcttcaacatttaatgggaagtagattgttggtggatgtacaccgaaatctaataatcgcttagccatgtctaaagtacgtacaccaaattctttttgacgaacaccacttaacacaaactcgtgtttacaatattgtttataaggtatttcaaagtgttcagataaacgtgctttaatataattcgcattaagaaccgctgcttcggaaacctctttaaggccagttgctcccatagttcgaatatacgtataagctcttaagtaaataccaaagttaccataaaatggttttacacgtccgatagaatttttaatgtcattatcatatttaaatttgtcgccatctttaataaccattggctttggtaagtaacttgctagttcttttactacaccgactggacctgaaccaggaccgccgccaccatgtggaccagtaaatgttttatgcaagtttaaatgaacagcatcaaatcccatatctcctgggcgaactttgtccataatagcgtttaaattcgcaccatcataatataatagaccaccagcattatggacgatttcacggatttccataatatttttttcgaaaatacctaaagtgtttggattagttaacataatagctgctgtattttcatttacaacacgtttcaagtcatcaatatcaacttcgccacgttcgtttgattttacagtaactgatttaaatcctgcaaatgaagctgaggctggattcgtaccatgcgcagaatctggcacaatgacttcatcacgatgaccttcaccattattctcatgataagctttaaatatcatcaatgcagtccattcaccatgtgcaccagcagctggttgtaatgttacctcatccataccagtaatttcttttaattcttcttgtaaactataaataatttctaatgaaccttgaacttggtcttcatcttgtaatggatgtgattcactgaatcctggtattctagcaaccttttcattaattttagggttatacttcatcgtacatgaacctaatggataaaatccgttatctacaccgaaatttttatttgaaagttcagtataatgacgtactaagtctagttcagcaacttcaggaaactccgctttgtttttacgaataaatttatcatctaacaatgactcaacagaatttgttttaatatcacttattggtaatgaatatgcatatctgccttcacgagatctttcaaaaattaatggacttgatttactagtcatttaactcaccagccttttctacaaatgtatcgatttcatcttttgttcttaattcagttacagctattaacatgtgatttttaaagtcgtctgaaacaacacctaaatcaaaaccaccgataatattgtacttcactaattcctcgttaacttgttgaattggtttgtcaaatttgactacaaactcattgaaagatgtaccatctaatacttcaaaaccttttttaataaattgttgtttagcatagttagcatgttctatattttgaactgcaatatcatagataccttgtttaccaagtgctgacattgcaattgatgacgctagggcatttaatgcttggttagaacaaatattagatgtcgctttatcgcgtcgaatatgttgttcacgtgcttgtaatgttaatacaaagccacgattaccttcatcatcttgtgtttgaccgactaatctacctggtactttacgcattaactttttcgtcgttgcaaaatatccacaatgtggcccaccgaattgagcaggaattccaaatggctgagtatcacctacaacaatatctgcaccaaatgaacctggaggtgtaagtaatcccaatgctaatggatttgcatatacgataaataatgcttttttatcttcaataaagctatgaatcttttcaagatcttcaattgaaccatagaagtttggatattgaactgcaacagctgctgtatcatcatccactgctgcttctaattttttcaaatctgtaacagtgccatctaaatcgatttccactacttcgaattccttacgcgtcttagcataagtatgaagtacttgtaatgcttgataatgcaaaccttttgagactacaattttatttttctttgtttgactaaatgctaaaatacatgcttcagcaaagctagtcatcccatcatacatagaagaatttgctacatccatatctgttaattcacaaattaaagtttggaactcaaaaatggcttgtaattcaccttgagaaatttccggttgatatggcgtatatgctgtgtaaaattctgatcttgaaatcatagcatccacaactgatggcgcgtaatgatcataaacaccagcacccaaaaatgatgtatgcgtttctttagtgatattcttgcttgcaatgcgatttaatcttctaagtaacgttgtttccgcttcgctttcagcaatatttaaatctctatttaataaaatgtcacttggtacatcaccgaataattctcctatagattttgcaccaattgtttgtaacatttcttgcttgtctttttcagttaaaggtatataacgatgactcacaatgcacacccctttttaattatttatcaatttgatttttcttaacaattttcgcttttaattgacgcttacgaacttgaacaagcaactctctacccatttcaaactcatctctttttatcattgcaagtgcaattgattttcctgatgatggagactgtgttcctgaagttacttctccaataatatttccatctaaatccataacttcataaccagttcttgcaattcctttttcaagtaattctaatcccactgttcttcttggtgcaccattttccttttgatcttttaatacagatttaccaataaaatcagcatcaattaatggtttacttgcaaaagcgataccaccttcatatggtgtaattgattcagttaaatcttgtccatgtaatggcaatccagcctctaatcttaatgtatcacgagcgcctaacccacatggcataacattatactctaataaaccatcccaaattttttcagtatcatcgatattacaataaatttcaaacccatcttcacctgtgtaacctgactgagataaaatgacgatcgctccaaataatttgacaccctgtttaaattcaaacattttcatttcagttacatcttcatcaactaattgattaattaaatctctagcttttggtccttgtattgctaattgaccatattggtttgatacattttgtacttcaacatcaaatttctctttgtgttttaaaatccaattaaaatctttttcagtattagcagcattaacaactaataaataattgtcgtcagctaatttatatattactaaatcatcaataataccgccttcttcattacataaagcagtatataatgcttttgaagtagttaaattatcagtatcatttgataataaatattgcacaaactgactagcatctttacctgtcacttcaatttcacccatatgactaacatcaaacaggccaatttcgtatcgaacagcattatgctcctctttaatacttgaaaattgaacaggcatcgcccatcctccgaattccacaatttttgcacctctatcaacataattttgatataaaggtgtttgttttaaatcacttgacattgaaatacccccttaaaattataaaaacaggatagcaatcgctaccctgtttataaatcaccaattcaggaacgcgttacagtattatccttttgcctgagagtttcgtaataaattacttgcaccttcggcgatagagtcttaacgctctattctctctaatactgatcactcgcttttattaaatttagcaattcataatatatttctgaaattgatagcaaatgactatcaaatttcttgaatgcgatttcattatatcttaaaatccgcgagcaatacaagtcatttaactgcttgattgtcttattatttgcattaggtcgatgtgggtcatcattgattcgactatatataatatcaatattacaatctaaccaaataatgtttttttgatttttcaaaaaattaaatacctcttcactttcaataataccaccaccagtagcaattatatctgcagtgttaatacattcttgcaaacatgtgaactctaaattcctgaaatattgttcaccatgtttactaaatatttctggtattgttaacttatacttttcttcgatatatgaatctatatcaataaatgataaattttgctcatctgcaacgtatttaccaatcgtagatttaccggtacccatgaaaccaattaaaattattggtgatttatcatgattcatgcgttttcccttctttcaataacaaaacaatcttatagttatagtcagtttcaatattatataatgtctttaattttaaactatattgactgatataaaaagtgaaaatggaaaaataaattgctgttagcatcaataagaacggcgtaacatatcctttttctttatataaatcaaaattaataaattatttcacgtcctttttaatagtactcatttaaattctagtaagttatacataaattgttttagtctgcagatttgtaccgactttaactgttatcgttattttaataatagatttatagtagatatttgcagtaaatgctgtaacattattaatcattgttatatttcctctgtcatttacaactttaataattttattatttattaatttgtattcgatcatttcttcacctttatgtaaaatgatacgctgttgcctaatttcaatatcgtttctatctacacctttaaaatcctctagaatatctcttgagaaaaattcgaaatctacagttgttaattccctactttcaattagaaaagttttgctaagtctaattaagtctggaacaattagtaaagttatacttataaccatcatcgctactaacatttcaattagcgaaaaagctttgacattaatactgtatacatgtcttttgataagaagtggtattttttgaaatagcacaaatttgttggtcactttgcttaatatcatatttccctatagttacccccttcttaagttcttctttattaattttagatacagtcgtcaaaattactttagaagcatcaattgtttgtagtttatggtttatactcgcttgcatttgattcatcattggtatcaatagtaatgtaatcaatccaataagcaaaaatccagccatactatctattaagaatgatcctttacacttatagcttttcataacgaattcttcctttttcaatatggaatattattctataaattgaattgttattatcaattgttatgctaccaaatttattgatattcccttttttatcaaaggcaataatatcaacttttgcaacattaattattttgcctacttttagttttagaaatcgtattttattattctctattactttaatagtgtcactgttttcataaaatctaacattgatatatccttgatttgctatagcttgcgacttaatataattcaattcagtaataagagaaatgatatttgcctcatcatctattactctaagattgcttaatcctttagatgtcaatgtcaaaagtaaaaatatactgattaacatcattaccacaagcatctcaatcatagtaaatgctgactgttttctaatttgcaactgcttctccattactaattgttattgtctctcctgatttacatgtcttttgctcttcttttataaaaccatctgcaattaagtcttcaatagacgatggatttctattatgtttcaatgcatacgcttcaatttgactattaaccatttttacctgtgcattacaacctgttgattgtatgtgagcagtttgtttagcaatatttggaatgattaaaattaataataaactgatgattaataacactaatagcatctctatcaatgtaaacgcttgagttttcttaagaaatttaaacatatattaacctccattattttatactttgcatcatttgaaacatcggtaacataattactaaataaattgcgacaataaataaacctaaaatcaaaaataaaataggctgtaaaaactgagtctgttttatcgctttatcttctatttgttttactaatatttgcgaatataactttagttctacttctagcttccctctcttttcaccttgtagcacaaacttaattaattgaggcttaaagcattttagtttttctaaaatttgaggcaaaccatatcccatttctgaataagttaataagtatttacctagaaactgtctaaatggatcactactatggttaatataaacgtctactattgattgaagtgtaataccatttttataaaacaacactaattcattagttacaaaataagttttaaataattggaaatagcctgatattagcggtagtttcatcacaaagtttatcttattgagcatatttaaattgttataaattaatttcataataatagccaacatagatactattatgagcattactacaattatagtaggtaagctggtaatgaaaaaagacaatgttttttgaaaagaagatagttgaatattcatagaagtatataattgttgaaactgtggaattactgtgaggtttaatataataatcatagcaataaaaatagaaactagtattaaggggtattgcagtgtctttaacaatcgttgttctgactttctattcactttcatataatttacggtttcttctagaacgtctatgatattgccaaatctttctgccaaatatacttgcaggacgatagtatcgctataacctatcagtgataatatcttattgcatggtgcaccatttgaaatttcacttagaatggtggtacctaattgcttatttttatatgtcatttgaagatttaaaaattgaaaactttgatacagagtgaaaccatatttcaacaaattacataaatttgaaagtaaatcgatttgttgggccttacttaattgtcgcttcttagaatgtagtttaaatgtatttatccattgtagtttcacaaatgacacctgcttttgtcatatcatcaagtttatcttctaagttcttaaatgatgatggtaatgaatgattatgggaaaagaaatatcggagttgttgctgagatagaatttcacatactaattgtcgctgttgcttaatagtagttacaagtcgttggtttataattaagttagttgcctgtatcaattcttgtacagaaatgcccatttctaatagccttaaaatagcacctttacaatcagttgcatgcaatgtagtcagaacaaggtgaccacttaaactagcctgtataacacacttggcaacatctttatctctgatttcacctattaaaataacatcaggatcacatcttaaaatagctttaaacgaatttacatagttaatgccagctttatcattcacattaatttgcacgataccaggaatttgcatctctacaggatcctctatagaaattacatttaaattcaaggctttattcgcgtatgagaccatttgatacattaatgtactctttcctgaaccagttggcccactaaacaatagtaatccttgtttcttattcatgaggtgtttaaaatcattgaatttataagttgatttctgttgttgaaaaaattgaggtacaattctgataacacaactttcttggccaagtgacaatggtaaagttgatattctcaaaaaaatatattttattgaaatggtaactatatcgaccgctctgtgcgacttgctgtgtagaaacatcaagcccagcttgaaacttcatataaactaataacttttgataaatgctattcccaatttgttcatactgctccaagttatcattaattctaaatttaatacttacttcatttttaactggaataaaatgtacatcactcgctttcatttctatcgctttattaattatttcttgaaatagaatcttcaaaaaaacacctcctacatataatcacgtaggaggtgtttttattacttcaatttaaccgtgtaaaaatggatttaattgttcatcatcaaccgtcgtatatggaccatgtccagggaataaaggtaaatcgccttctaattcaaatattttatcttgaatagaatcaactagcgtttcatagtcacctttatataaatctgtacgtccgattccattattaaataatgtatctccaacaactgcgaattcatcaaacacatatgttaaacttcctggtgaatgtccaggtgtgtgtaacacattaaacttaaatccttctatttctgtgctaccttcgtttaacttttcaggagttaccttacttgtaataattggtaatccatattgcttaaatttatctgctccatttttaacgggatcttttagaaaatcaaactctgcttcatgcatataaaccgggacatcgaatcgatcaactatatcatcgactgctccgatatgatcaaagtgtgcatgtgttaataaaatagcttttaatggtttatttatttggtttaattttttaataattttttcactttcacctgaagggtcaatcagaataacagctttgtcattttcgatgaaatacgtattagtatcaactaagcctaaagttaagcttgaaatcctcataggttttcaccactattttctaaatgtttttgtactgatgttagtttatcattcatttttctagatttgtctcgtcggtcatcaatacggatatttgtacaaactctacttaaacctttatcaaaaggtaattcatgtatcacttgcacaacttctaatacatcgcttaattcaccttcaattagagtattcattggtgttaattgaaaatcaattttacccatcgctttatattcttgaagttttttctgaatatctgctatatatttactaacactcggaccttccgttccaactggaataacaaccacatcaacaatagccattattttaccccctctttatctaatacataggtcttgattaatcctgctgctcctgtaatacctgcatcattacctaatttcgcttgtacaatttcagtttcaaattgagcaggtgcaaatgttaaattatgatattctgttttaatattttcaattaaaataggtcctgcagtagacattcctccacctagaacgatatatttcggattacttgtaacactaataatactacataaatatccaatatagtttgcaaccttttcagttatgaaaatacagaattggtcaccagctttagccgcatcaaaaacagcttttgctgtaaccttattttctttaatcaattctaatatagaagatctaaacgtcaacttcggatagtagaagttgactaagttaacaacgcctgtcgctgaagcaactgtttcaatacatccagaacgaccacaattacatttaaatcgttgatcgaagtctgctctaaaatgacctatttctgcgccagagccattatgaccatgtacgatttcaccatttgaaataattcctccacctagtcctgtaccaagtgtgatggcaacaacatcatcggcaccttcaccagcacctttgtgtttctcccctaaagcagctatgttagcatcattatctacatacactggacaatcaacgaattgttcaaaaatctcacgtacattaactttttctggccaatataagtttactgctccatttactgtacctttttcaaagtcaacaggacctggaacaccaatacctacgccaagtacatttgaaaaattataattattttcatttactttttcaacaaacgaatcataaattcctttcaaaagtgtataacctgtactatcagatgtatcagtgtgaatagaccatttatgtaattgttctaattcaggtgtgaaaatacctaatttacaagtcgtcccgcctacatcagctgctaaaataatttttgtcatttctgttcattccttctctgattaattatcaacgtacatttcaaatattcttccttagataacagttcatattgatacaatgatgaaatctcctgttgaatcatttcgtacatatcttctggatttttaaaatatattagaaatccgtaacttttcaataactgttgtacatcataaaagttatttatttttcgactcatttgatttagtcaactctttttctaagttaatataatctgtatttttagggtctgcatttaatgctttacgcacatattttaatgctttttcatcatcatttaatgaacgatttgctatcgctaactcaaaatttaataaacctgatttaggaaacattctaagtcctcgctcccattctgtcataccttcagacttagaattgatagtagccataatcataccacttaaataatatgtttgatcatcggcataatttttatttattgtctgcttcacaatattttgagcattatcataattaccactagtcatatcatctttgatcaatttattataaatattatcttctttaattgtaaaaattctaatttgaagtgcaataaatataacaagcataccgattagtaaaatccaaaaaatattacgattcactttatagtaatagccaattaaagttattaataaaccaccaatgaagcctccaatatgcgccacaatatttatatttgacataaacagagaaacaccaactaatatcactaatgcaattaataactgtcctaacatttttttgttaaatgtttttgaaacatacatcatcgcaaaaattgatccgatcagaccgaatatagcaccactagccccaactgaaattgtagtcgtattaaatgatagtgatacaaagtttccaaacagccctgcaataaagtatacagttaacatcctccatgaaccaataattgcttcgactattttaccaaaaataaataatgaaagcatattcataagtatatgttcaaaactaaaatgtaaaaacatcgatgtaacaattcgataccactcaccatgtacgacattaaaatgcactaacccgccaacatctaataattttacatccgaaaaattatttaaatataaaatcatacataaccatattaagacatttacaaatattattgtgtatgttgccggtgaaaatttctgcatatatttatctaaaaagttatcggttaatactttgcgtttatagaacatatatgtctttttatcattatcttctgaaataagtctagccaaaaatatattcggcatatgctttatcaaatcttttgtgtgtcttataacattgaatttaattctaattggcgaaacttcatttaattgttcttctgaaaattccgattctgtaaaataataaaattcaaaactttgtggttcgaaagaaataaaatttgctatttcatctttgtgttcaagcactttcgctttgtcaaaacgtatttcttgggtagacttgatatgttgtttaaaaatgactacttgtttttttcttttatgggctaaccaaatttcttggtcatctttttccctactgacaatatcaaaattcaagtacctaatccaataatatattgttttccaaaattgtttgtctatgttcatttagtcctccactatgctgattgatatataatcaatttatcgactggttgatcgaatgattccggttcaaatgatgttatttgaaaatcgtataataagcttattgtctttgtctgataattagctaaaaacctgtcataatagccaccaccatacccaattctatatccatcgtcttgaaatccaacaccaggaacaacaattaaatctaggttattcgttgtttcaccttttgaagttggatagtaaatccccttcttatctacatcaatatcttttagattaaatatctctttaaaagtcatttgatgatttaaataatccattttcggcacaaaaatacgtttatgatccattaaggcttgttcaataatagaaaaagtatctacttcatgattaaaagaaagaactagcgcaattgcgtttgcttctttgtattcttcagttgcaaaaaattgatttcttaaccatgtgtctgcttttcgcttttcagctttattaaaagtcttcattttatgtaaaatatattttctaatctcatttttagtcacattatcacccactttattcaattctattatatcgttaataacaatacatgtcattatgttgtcatgatgaattatgcgacaattctaaaatttattatttcaattgaaaatcttttatcatttcatacgtgtgcacaattaaaaaggtgaaacctcttattttgagatttcaccttttttattgttaatttaaatttaattttaatgattattttgtttcacggtgtaaagtttgtttgttttcacgtgaacagaatttcttcatttcaacacgttctggattatttcttttgttcttagttgtaatgtagtttctgtcaccacattccgtacaagctaaagttacgtttacgcgcatggttattcctccttatcatttctaaatacgactttattattataccaacatctataatatttgcaaagttaaaattttacaaccatgcgctacataatcgtcaggttaaattttatttgtctttgtctttatttttatcgtctttacctaactgcttaaagtagtagttaattacatctctacctaagtctccacctgttaaccatggtggtggtacaggctgatttgtatatacaattgaaaacgctaattttggatcatcaattggcgcgtatcctatataagtagagttaactcttggctctccgttttggaacacttcagcggtaccagttttaccagcagtaggcactactgtatctttaaaactaacatatccagtaccatctttatcattaaatgccattttgaatccttcttgaatttgtttgatttctttttcagtattattaaccttgttcaagacagtgccattaattttcttcttgagtggaccaacatcatctttattagttgattcatgaatcgttaatccaatgtgtggttgtattctataaccatcattcgctatagttgaaacatattgtgataattgtaatggtgtataggtatcatattgaccaattgataaatctagataattacctggattatttgttaatggttcgatttgaccttttgtttcatttggtaaatctatacctgttttcacacctaagcctacttgattcaatcctcttcttagcttttgggcaggtgaacttatgtctgatggtaaagccataccagaataataagggtctcccgctaattttaatgctgttttaaacatatatacgtttgatgaatgcatcaaagcttgcttatcattaatagatacatgcccgtttttattaaagtatgatcgttttgtcaaaccaccttggaaatgtaatggttcatcgaccattgtttctccaactttgatagctttattctgataaccagctaataatgttccaccttttacagaagatccaactgcaaattgagaagtaaacgtaccaatgtcataatcagtcattttaccactcttattaatctgctttccggcaagcgcaagaatgtctccatttttaggattttgtacaaccatcatagcattatccatatcttttgcaccttggctgcgaagcttcttaatttgtttatctaataatgcttctacttctttttgaagatctatatcgatcgtcaatttcaaatcttgaccgcgagcaccaggatttaacacttctgaagatgtaactttaccagatttgtccgttgtgtatttcatttctttcttcttaccacgcaatacatcttcatattgatattctaggtaagattttccaacacgatcattgcgtgaatatcctttggataagtaatgttctgtcaattctttgggaataccttcagcaggtgtcgatacatctccgaatatacctcttaaagtgtcgccatatgggtattttctatcccaatccatagacgtgttaacacctggtaatttggaaagttgctgagaaactgctgcatactctttttcactgacatcttcattttttatcatttgtggatctaaaactgttcctgcattcatctctcgaaaaatggctaaaacttgtaaatctttagaagacaattcatctaattgtgattttccgattttcgataacagttgtttatcatattgatcttgtttaatacttccatctgctaacatagcttgttcttttgtcatcattgcttttgcttttttaggatgcaactgaatccagaaatcttttttatcacgttctgtaatcttcttagtatccatcttgattagctttgataacttttcagccgtatccaacatttccgattgtgttgtttttcgacccctagtatatgtaatagccattttagaagcattatcaactaaaactttcccatttctgtctaaaatacgacctcttggcacagactcattcactgtaatgttttcatcattttttataatttgtttataatgtgagccttgtgcgatttgtaaataacctaaacgtagtactagtactgcaaaaataaatacaatcacaccaaatataaagttaattctcttgttaattgtattttgaacgatttcatcatttgatttttcttttagtctttttaacaaaactacctacctctattcaaagtctttcactttaaatcatatatgaatttagaaattatttctatctttttgacaaaaaaataacggtctcatttaagagaccgaacaagtaatcatactttattttgttgcattatataattcgtcaactttttcccagttaactacattccaaaatgcgccaatgtagtcagggcgtttgttttgatattttaggtaataagcgtgttcccatacgtctaaacctaaaataggtgttttaccctcagttaatggattatcttggtttggtgtagtcacaatttctaactggccattgtttacgactaaccaagcccaacctgaaccaaagcgtgcagctgctttgtcagcaaattcttttttaaattcttctaaagaaccccattgttctttaattttttctactacagtacctttttcttctgagtttggtgaaagtaactcccagaataatgaatggtttaaatgtccaccgccattattacgtacagcagtttggatgttagctggtacactgtctaaattagcaacaatttcttcaatagatttagattctaaatctgtaccttctactgcagcatttaatttcgtaacataagtgttatgatgtctgtcatggtgaatttccatagtttctttgtcaaaatgtggttctaatgcatcaaatgcgtatggtaattttggtaattcaaaagccataaataatcatcctcctaaaatgtctgtaagtaaataataacaagcagtgactggttcaacaaagaatttgcttaaattctactacttattattttctctactcatttaatataactcaaatcaaaaataattaaacattttgtatataaaaagttaacagatttgccataaaatcatacgaacggagtatgaaatgaacctttatcttctataatttaaaaaatgagatttatgcatacatctgaccaaatgtgcataaatctcatttcttcatattaatcttggcaagactcacatacaccataaacttcaagtttgtgtttgtgaatattaacaccaggtagtgataattttatctgatctattggacaataatctattacctttgtatctccacacttttcacagataaaatgatgatgatgatgatttgtacaagcaattctaaacttcatttcaccatcaagttctgtattttcaataatccctaaatctttaaataagtgcaggtttctatatattgtgtcgaatgaaattccaggataattttcatccataacttgttgtatatactttgcgtttatatacttatcttcttcgacaaaaatatctaacatatctttacgtttatctgtatattttaaaccgttctcttttaaaattttaatagcatcatttgtattcattgatattagctccctttttaaacttcattcgcattttctgataagccattgtaatcataagtaaaataactagtagaactacaattacaccacccggagaaatgtccatatagaaagctaggactaagcctaatattactgataattcacctaaaaatacacttagtaatatcaattgcttaaaactttttgttattcgcatacttattgcaattggtaacgtgattaacgcacttactaacagtatccctacaacacgcattgaggcagaaataaccatcgctacaataacaataaataaaaattgaatccatttaggaatgccaatgactttactatattcctcatcaaatgacaatataaataattctttataaaacaatgtaataaacagaacaactatgatggcaatgacaataatcgttgttaaatcacttatattcactgcgcttattgagccaaatagcaatccaacaatttcttgattgaacccatcagctaatgaaatgaagattgcactcaaggcgataccagcactcattataattggaatagcaatttcttggtaagcagtgtatgacgttcttaatttttcaattagtagcgcacctactattgcgaataagattccaaaccacattggattaataaatactagtgttggcataatagtaagtaaaaacataccgaaggatataccacctaaagttacatggcttagagcatcagctataagtgatagtcgtctaacaacgataaaagcaccgattagaggcgcaataaaacctatcaagataccactaattaaagagtacctcataaaatcaaaattcaataatgcatctatcaattgtgacacgcctttccattttaaataaactcaaatctttattaattacaacattctcgattatgctgatgatcgacaaaacgtacaggatgtccataaatttttgaaatttcaacttcatcaagtgatttaaactcatcagttgtaccatggaaatgcaaatgcttatttaaacatgctacttcagtagcagtatctgctacaacaccaatatcatgagtaactaagataatagtgataccttcttgttttaattgatctaaagtattataaaattcacttacatgttttgcatcaataccattcgtcggttcatcaagtactaatactgcaggttctgaaatcaatgctcgagcaatcattacacgttgttgttgaccacctgataattctgctatatttttatgaattaaatcacttatattcagtctttctagtactttaatcactttttcattatctttgctattaaatgtttggaaaagacgttttgtctttgttaatccgcttaaaacaacttctttaacacttgctgggaaacctgaattaaaggcatttgctttttgtgatacatagcttaatttaattgatgttttcttatttttaaaatcaataccttcaacaaaaatctcaccactttgtaaaggtaataatcctagaatcaacttcaataatgttgatttaccagcaccatttggtccaacaattgctaaaaattcacctttatttattttaatgtttatattttctaacacttttttatgatcatagtagtaattgacatttttcaattcaaagactggtgtcatcgtattctcacctcgcattcaactatacaactcctagtaacatatgtaaacagtaatgtttacgactcaaaattagacaaaataaagagatatgcccccttcaagttttatttatcgcatttcttgaagagagcattatcattttattgttgcataaccttattttttaattctgggtcaaaatgctgttgttttaacatttcaatttcaagtttatatggcggttttttatttttcttatcttcaccaacataaggtgtttctaagattttcggaatatctttaaaactatcatgatgcacaatgtaatttaatgcatcaaaaccaatgtaaccgaagccaatattttcatgtcggtctttttgagcgccacggtcatttttagaatcattgacatgaacaactttaatcctgtcgactccaatgattttatcaaattcatttaatacgccatcaaagtcctctttcacattatatccagcatcatgcgtatgacatgtatcaaaacatactgataaacgttcgttattatgaactccatcaataatacgtgctaactcttcaaacgagcgaccaatctctgtacctttacctgccatcgtttcaagcgcaatacgtacattattgtcattcgttaaaacttcatttaatccttcaataatcttattaattccggcatcaacaccagctccaacatgtgcacctggatgtaatacaatatctttagcgcctatagcttgcgttctttcaatttcttgttgcaagaaatctacaccaagattaaacgtttctggtttggttgtatttgcaatattaatgatgtatggtgcatgaacaacaatattagataagccatatttttccatcacttcatgacctttagttatatttaaatcttcaatacttttacggcgcgtgttttgaggtgcaccagtataaatcataaatgttgtttcaccatattcatgcgcttctatagcagaaccttctaacatctttttaccactcattgaaacatgtgatcctaataacataaaacacacctaaccttttttgttttgcttacgtttttgtctattttgctgcttactaaattgtttacgctcttgacgtttcattttttcaacttcttgtttaaatttcttcttataacctggtttaactttgtttttaattttacttcgaactttgttcttcacttgattagttaaatggtcatctttgcgcattcttgcttgacgctgattgtgcgctttaacttcttttaactcaccatctttaatatcaacagtattgaaaacaaaaccgcgatcttctattaatgaaatattgtgttcttcatcaggactataaagcgtaattgctacacctttataattcccacggccagttcggccgactctatgtgtaaagaagtcaatatcatttggcacatcaaaattgatgacatgactaacaccttcaatatcaataccacgagatgctaaatcgctggctataacgtattggaattctaaattacgtatacgtttcatttgttgtttacgttcacgtggcgttaaaccaccatgaatcataccaactttaataccagcttcatttagtgaacgtgctaaatcatttgcgttatctctactattacagaaaacaatacataagtatggatttagtatatcaattaaatttaaagtcttttcaactttagctgcacctttagtaggtattaaaaagaattcgatgttctttttattttgttttttactgtcgacagctacatattctggatgacttaaatatttatttaaaaatggttgtaactgttctggaattgtagcactaaacaccgcaatatttgcattatcttccaatcttgcagcgatgtaatctacatcttcaattaatcctaagtcaatcataagatccgcttcatcaataactaaatatgatgctaagtgcacatgtaaatgtcccgttttagctaaatcattaattctagtaggggtacctataatcaattgaggttgtgcattacaacgttgtctatctttctctatatctgtaccaccaataaaaactttaactgaaacaccagctttaaattggcttaaatggttcgctgcatcgtatagttgttgtgcaagttctcttgttggtgcaactacgattgcttgtggttcttttatttcactatcaattaactgcattaatggtaataaaaatgcatgagatttccctgtacccgtttgagattgaccaattaaatttgttctctttagtattcttggaataattcgattctgaatttcagttggtttttcaaaattaaggtctttcacagcgtcaattaaactagattctagattaaattgttcgaatggatgttttgccatgatttggcctccttatatgttcatctttactattataaagtataaatgtgctattttaaataaaaatattaaaacctcgaaatttcaaaatttagaaatcccgagattttagtttaaatatattcaaatggatctgtattaattgtagatgcttcaacatctatatttattttttctgtattgaaccaattcattagtaacgtttttaaaccttctttcatcacatattcgctgtaatgattaatatcaattaagttcacaccatgaattttagcatctaaggcatcatgatgtttaatatcacctgtaacaaagacatctgcgccttgttgaacagcttgatattcatatccaatacctgaaccaccaataattgcaatacgtttaattttctgattagactcaccaacaaaacggacacttgggatatttaatttagatttaatattagctgcgaaatcttccaatgtcatttgattatccacttctgccataacgccaagtccataaagagatgtttgttttatctcaataaaatcaaataccggtgtttcatatggatggtattgtttaattaattgctcagcccatgacttttgacatgcatctatcataaattcaattttaacttcatctacatattcaattttatcaatttgtcctattgttggattagcttcaccaactggtttgaattgccctcttccttcactttcaaagaaacaatattcataattaccttcttgtgctaatccattttcactaagcttatctttaaatggtccaacattatccttaggtatatatgtttgaactttatagtatacatcttgttgattatttattattgaaatgttcttcaatcccatcgccttcgccaacatcatattgacaccatgaggatttacatctaaatttgtatgcatcgctattaaattaatgtcatgttgaattagttttctaataatcaaaccataaccattagcttttaatgatgttacacctttaaagattagaggatgatgactaataatagtattataacctttttcgattgcttcatttactacttccaacgtacagtctaatgctgttaaaacaccagtaacttcaacatcttcatcacctattaacaatcctacattatcccaagattcagcagttctaaatggcacatgatgatctaacaatgtcattaaatcagctattttcattactataacaccctttcaattacagcaatttcgtcattaatttgagctaaacgttgacgatgttgttcagtattgagtttcgatttaatatgataaagtgcttctaactctctttgccatttttttataaaatattcatttttgttattcagcaattttggtccgaatttcaattcatcagatgatagctctattaattgcgtagaatattctgctacaacaatttcataaatatggcctttttcttccattattatttcatcaattatttcataattcaattgttgtaatgtttgtcttaaattttcagtttggatattactttgtaaaatcaaccttggatgttgacttaacttatcttgcccatcttttaaaattttagcgataagtggtccgcccataccacaaattgtgatattatcgattacatcctcaggatgaataacacttaagccatcccctaaacgtacatcaattctatctactaattggtttgcagctacatttttcacagcagcttgaaaagggccttgaataacttctccagcaataccgcattcgcataaatggttttgtattgcatagattggcaaataagcatgatctgagccaatatccgcgattgtaccttgttttaaaaatcgacttaccgtcgttaatcggttatttaacgaaatcattttattctcctttatgaaaaaagaggttgaacattattcaatgtaccaacctcactcaagttaaatcttaatctaaaaataaataagcgtttattcatgtcttggtatcaatcattaaaattgatataaattaatccataaagtctttcaaacgtttactacgacttggatgtcttaattttctaagtgcttttgcttcgatttgtcgaatacgttcacgtgtaacaccgaaaactttaccaacttcttcaagtgttcttgttctgccgtcatcaagaccaaatcttaatcgtaatacattttcttctctatcagttaatgtatcaagcacatcttctaattgctcttttaataattcataagcagcatgatctgaaggactttgtgcttcctgatcctcaataaagtcccctaaatgactatcatcttcttcaccaattggtgtttctaatgaaacaggttcttgcgcaatttttaaaatttcacgaactttttctgctggtaaatccatttcttcaccaatttcttctggtgctggttctcgacctaagtcctgtaataattgacgttgaacacgaattaatttattaattgtttctaccatatgcacagggatacgaattgtacgtgcttggtcagcaattgcacgagtgattgcttgtctaatccaccatgttgcatatgttgaaaacttaaatcctttgttaaagtcaaatttttcaacagctttaataagacccatattaccttcttggattaaatcaaggaataacataccacgacctacgtatcttttagcaatacttacaactaaacgtaagttcgcttctgcaagtcttgattttgctacttcatcaccttgttcaatacgtttggctaattcgatttcttcttgtgcacttaataagttaacacgcccaatttctttaaggtacatacgaactgggtcatttattttaacacctggaggggcactaagatcacttggattcagtttctcgtcagtatctgaactatctttttcattaactagtgaaatatcattatcatttaattgatcaaagaaatcatccatttgatcagagtcgatatcgaaattctgaagtttttcagcaatttcttcatgacttaaatgaccctcttttttacctttttcaattaattgcttcttaacatcttctaatgttaatgtcggatcaattgtttgttttttaattttaactgtgttatcagacatgaaacggcctcccgattttaaatatgaacattcgaaatttattcaatattgctattttaaactaaattcttaattaattcatccatatttttaattttattttacaaataggaactaatcccaatatttatttttcaatagtgttgtttaaatgcggtaactatcatttacccttatacattttgacataatcattattcgtattattctttaaaaccacatgctacatgcgttctttattcttagcaacaatttgctgtaaatagtatttctgtaattctacatcgccaatccttgtagcttcccttaatttatggttcaatgactcaattgtttcttgtccgttttcattaattacattgacataatcatcaatttcattttcatatggttcatcattcaaactatattgttctaagctaattagtgtttctctcaactcatttgaattaacatactgcacagcatcactgatattatattgatcattttccgcataaaaatcatgtaagacttcgaatacatatttaaaatgctgatttgtgaagttatccttatcaacactttcataataatttaaaaatgtatctttatctctcattaaatgttttaaaaatgctcgctccgctttttcttgacggctcaaattgtcaaattgtgccataccaattggctcaggttcaatgtaaccgccatactcatcttctggataataattggctggtgcttgattgaattgtatttcgtttgctaattgctcaggactaacattgaaaaatggtgcaacatcatttaaagccttttgttgcaaaatcgatgacttcataagtgaaatgtcatgactcagttctttcaaataacgttcatatgaaaggtcattatgtgcaatttcatcttttaatatactcactttataatgtgcaaatgactttttgtcattttttacaaaagcagtaaatgcgtcgttgccatacttaccaatgtattcatcaggatccatgccagatggcaattgtataacaaatacatttagcccttgctgtaacaaatgttgacctgttttaagtgttgcttcactacccgcaaaatccccatcaaacattaatgttatatttgatgttaactttcgtataaaggtaatatgttcatctgacaactgtgtacccattgttgcaacaacgtttttcaagccagcagtatcagattttataacatccataaaaccttctagtaatacaatttcatctaattttctaattgatttacgtgctttatctaagttatataacaactttcttttttgaaagataggtgtttcaggactatttaggtattttggttcttgaccggtatatgttcgacctgaatatccaacaattcttccttgcgcatttttcaaaggaaacataatacgatttcgaaatctatcgtaataactgaagttttcttcgttacgtgataataatccggcttcatatgctaattcaatatcgtaaccctttttttgaagaaaatcatgacaaaaatgtgagctatcgggtgcaaagccaatgcctcgctctttaataagcgcatctgtaaaaccacgttcttgtaagtacgttaatgcttgttcgccttcgactgtctttgttaaagcgtaatagtaaaattcttgtattaactcatgcatttcaatcatttgtaaatcatcagaagcaatttgaacatttgagttagattgtgttgcctcaatatctacagcaacattaactctatcacctaattctttaaccgcttcaacaaatgatatgtctttaatttcttgagtaaattgaaaaacattgccaccttttttacaaccaaaacaatggcaaatttgtttatcttcagaaactgtaaatgaaggtgtcttttcatcatgaaaaggacacaaacctatataattgcgtcctctcttttctaattttacatattcacttaccaagtctaaaatatcggttttatcttttatttcattaatgatcgattgatctattcgcaaattaaatcacctattaagcattagttatactattatacctaatttttgacaaaaatgaaatcatttcgatttattttgttcaatataatggattatatcgtttgctgtttcttcgattgctttttgagaaacatcaatgacaggacatccaatttcacttacgatttcttcaaagtaattcaattcttcttgaattcgtgcttctgttgcatatcgagctgtgtcacctagtcctaattgttttagtcgctcttttctaatgcgatttaatttttcttcacttattttaagtgcgatacatttctttggatcaatatcatataagccatctggcggtgtcacttctggtacaatcggtacattcataactttgtaacttttatgcgctaaatactgggataatggtgtctttgaagttctcgaaataccaagtaaaacaatatcagctttaggtaatcctttaggatctttaccatcatcatatttaactgcaaactctatcgcatcaattttcttgaaatatgcatcatctaatctatgaacgatacctggctcattataaggtttttcttcaactgatgctgataataaatccattaatggccccataatatcgacggacttcaattggaattctgctactttctcactcatatattgcttcatttcaggtttaataagtgtataaacaatgatagcatttgtatctttagcaacttgaatcacttcatcaacatcttcaaaagattcaatatatggatatcttaataattcatttttacattgcttaggattaaattgtgaaatacctgccctagcaactaactctgccgtttcacctatagaatctgaagctacgataattttaattttttccattacttctcacctattctttatataatgctactaataacttagctattgttgttttggaaattcttccaattacttcatacttttgattatctttttttcttacaattggaatcgaatcaatttctttttcaatcattctatctgctgcgtatatgactaattcgctttcctctaaataagtgacattaggcatacgtgtcatattaacactgataggtactgtatgaatatctgctccaatcattgaagctcttaataaatcttttcttgaacacacaccaacaaaatcgttatcttcattaataataaataatgtacttacatcttctaaaaaaattgtacaaatagcgtcataaactgttgtattctctcttagcacaacaggttgagacatatagtccttaacctcaaattgtcgaagtttttcattaaaaaatttaccttttgatttacctgaataataatatccaactcggggacgcgcttctaaaaaacctgacattgttaatatcgctaaatctggtctaagcgttgctcttgttaaattcaacttatctgctatttgttcaccagtaatgggtccttgagttttaacaatttcgatgattcgttcttgtctttgactgagttctataggtcttcaccccttttttattcacttattattataccgatatttctttcatgtcacaaacacattaattttacttgcctttaaataatctatcaattagaataaacgtacagcgagttaaggatagtgtaagcttaacaataagattggcgcaacgaatcattttaaaataaaagcgagtgactacactaatttgggtggaaccgcgggttaaatacgtaacttattttgtattatatacaatttaaaatattaactcgtcccatggaagtaaagcatatttactatgctgttattttccatggggcgttttcatgtatgaggagaggtaattatggcaaaagatatggatacaattgtttcattagcaaaacacagaggttttgtgttccctggtagtgatatttacggtggtttatcaaacacatgggattatggtcctttaggtgttgaattaaagaataatgttaaaaaagcttggtggcaaaaattcattacacaatcaccgtttaacgttggtatcgatgctgcaatcttaatgaatccaaaagtatgggaagcttcaggacacttaaacaacttcaacgacccaatgattgataataaagatagtaaaattcgatatcgcgctgataaattaattgaagattatatgcaagatgttaaaggtgatgaaaacttcattgccgatggtttaagttttgaacaaatgaaaaaaattattgacgatgaaggtattgtttgtcctgtaagtaaaactgctaactggactgaaattcgccaattcaatttaatgtttaaaacattccaaggtgtaactgaagattctacaaatgaaattttcttacgtcctgaaacagcacaaggtatttttgtaaactataaaaacgtgcaacgttcaatgcgtaaaaaattaccatttggtatcggtcaaattggtaaatcattccgtaatgaaatcactccaggtaacttcattttcagaacaagagaatttgaacaaatggaacttgaattcttctgtaaacctggtgaagaaatcgaatggcaaaattattggaaaacttttgcaagtgactggttaacaagcttaaatatgagtagtgaaaatatgcgtttacgtgatcatgatgaagatgaattatctcattactcaaatgcaacaactgatattgaatataaattcccatttggttggggtgagttatggggtatcgcaagtcgtacagacttcgacttacgtaaacatgctgaacactctggtgaagatttcagataccacgatccagaaacgaacgaaaaatatattccatattgtatcgagccatcacttggtgcagatcgtgtaacattagctttcttatgtgatgcatatgatgaagaaggcgttgaaggtagtaaagatgcacgtacagttttacacttccatcctgcattagcaccatataaagcagcgattttacctttaagcaagaaattatctggcgaagcgattaagatttttgagcaattaagttctaaattctcaatcgatttcgatgaatcacaatctatcggtaaaagatatcgtcgtcaagatgaaattggtacaccttattgtgtaacattcgactttgattcattagaagataatcaagttacagtacgtgacagagattcaatggaacaagttcgtatgccaatctcagagttagaagctttcttaactgaaaaaacaaaattctaattaaaaagactctccaccatatgtggtggctatataatttataaaaagagatactggttagtaaaattgccagtatctcttttctattcgaaaaaggtattcaaataaacacatctatgtggctacttgaataccttttattattttatgttattgttccaatctttttaattggttgattagtttctgacttttaaaaaacatacctgcatattcacgatataacattaaaatgatatctgacatttcatcaataatttcttgatggatattcaatgaattcattttatctattggtaatttttgtaatacatctaataaatatagtgttttattcgataatataactgcatgtacatctttagaagcctcttgccttgaaatagcaccatcatacttaaaactataacctattaaatctgcttgtgtgtcattaccactcacagcacagcgattaaatgatgcggtaaaaccaaatcgtttcatacactttaacataacaacgactgacattaactgtgcagatgtacctgattctattttttcaagaacaaattgtaataattgatagttatatggtgcaacgtccccttcatccattgaacgctcaatagtttcagctgccagagacgcataactgcttacgtaaaggtccatttgtaatttataatgttgactaataacatctacagaatttaacgttcccatacctcgccacttattgtaaataaacaaaccataaacaaacaattgcgtttgcgcttgcaaacccgtcttaacttttttagcacgccttgccataagtggtacttttgcaccatgctcatttaaaatcgtgataattttatcagattcaccataatcaactgctttgatgataatccctttttggcgcattaacaattatcttcaccacttttaagattaatcttggtcttcaacataaccaatttggcgaataaagttaactttgtttcgccagtctctttgaactttgacccataattccaagtaaactttagagcctagaagcatttctatatcacgtctcgcacgttttcctacttcttttaactttttaccgccttttccaatgacaattcctttttgcgaatctctttcaacatatatagttgcttcgatatgaacacgatcttcgctttctttaaccatacggtccacattaacaccaatcgcatgagggatttcttcacttgtaagatgaaggattttttcacgaatgatttcacccactacaaattgttcaggatggtctgaaatttgatcatctggataatattttggtccttcgggtaaatacgtctttaatacatcaataaaatgatctacatttagcccttctaatgctgaaataggtacaatctctgtaaagtccatataactttgatattcttcaatctttggcattaattcatctggatgcactaaatctattttatttaatactaaaaatactggtgtcttaacatttttcaacatttctataatatattcatcgcctcgtccaatttcctcattggcattaaccataaacatgattgcatctatctcagataatgtatttttagcgactttcatcatatagtcacctaatttgtgtttaggtttatgaatacctggcgtatcaatgaatataatttgcgcatcatctcttgtcattacaccttgaattttatttctagttgtttgagctttatcggacatgattgctattttatggccaatcactctattaacaaatgttgacttccctacatttggtctacctataattgaaacaaatcctgatttatgttctgtcatttattctaaatcctttcctgaaaatccaaatggtagtaactctgcgactgtcatcataaccatatctcctttatgatttgtcatatacacaggcatatcatcatcacataattccttcaaaacttgacgacatgcaccacaaggtgatgacggtttatctgcatctacggttacagttattgattcaaaatcacctggtctgtatccttgagaaattgccgataccaaactagctcgttcagcacatatcgataatggataagaagcattttctacattggtaccataaaaagttctaccgtctttcgtttttaaataagcccctactttaaaatgactgtatggcgaatatgattcttgttgtgcttttctaacttcttgaaaataatgaggttgataactcatatatgcctccctaaaataacgctataaaatgtggtaaaaatactattaaacctataataaatgctaatattgaaactataagtacactaaaagccgctatatctttagcgtatttagctaaatcatgatattcaacggtcactaaatctacaacatattcaatagcagtgtttaaagcttcaacagtgagaactaatgcaatagcaatgagtataaatatccactcaatccgattaatatttagtacgagaccaaagacaatagcaacaatcattgcaaacacatgtaaaagaaatttatagtctttttgaattaagattttcagcccatcaagtgcatatttaaaccttttcataattagtctcgtgttaatccatatgcgtttaatattgtatcttgtcgaccaaacatttccttttcatccgcttcagtcatatgatcataacctaatagatgcaaaaatccatgtaatgctaaaaatcctaattctcgttcaaaagaatgtccgtaattgtttgcttgttcttgcgctacatccgtacagataattatatcccctaaaacacgtggtatatcaagaccactaaaatcaatatctggctcatcctcttctaaagcaaatgagattacatctgtaactttatctttatctctatatgttcgattaatttcttgtatttcttgtttatctacaaatgtaacagaaagctcagcatcgtcttctatatgctcttcttttttagcaaattctaataaatcttcaatttgtttataccaagcatctttaactaagcctgtgtgatcgctaaaatctatcgtaaacatttaattctctccttcataatgttcaatgattttacttaccaatggatgtcttactacatcgctctgatctaatttcaatatacttatacctttaacgttgtgtaacctactgaccgcttccttaagtccacttttaacacctttaggtaaatcgatttgagtttggtcaccagtaactaccatttttgagccaaaacctagtcttgttaaaaacattttcatttgcgcatgtgtcgtattctgcgcctcatcaagaattacaaatgcatcttctaatgttcgtccgcgcatatatgcaagtggcgctatttcgataatgcctctttcaataaatcgctctgtttgttcacgcccaagaacagtatatagaccatcatataaaggtcttaaatatggatctaccttttctttcaaatctcctggtaaaaatccaagtgactctcctgcttcaacagcaggtcttgttaatacaatacgtttaacagtacctttacggagttgctttgctgcataaactacagctaagaatgtcttacctgtaccagcaggacctataccaaatactaaatcattatttttcatggcattaacatatatacgttgccccatcgttttcgcacgaatcgtcttaccaaatgcatctttagttatctcttcatcatataaatctaacagatgttgaattgtgttattatgcgccattttaatagctgcttcaacatctttaattgtaatattattacctaaatcaataaccttcagcaaattgattaatactgattccgctttttctacgttttctatttttgtacctttaacggcaacttcttgtcctcttgcatggatgacaacatcgaaactctcttcaattgcttttaaatgttcatcattatttccaattaaagcttgagattggttcatatcgtctatttgtataattccaggcatacacgcgctccttttcatatatcatttatattcattctatgatgctttaatatctacttaattatatcatgcaattgattgatttaaacatctttgcattgacttactgatttttctttaatttaaaataatcatttatacttttcaccttgtcataaaaacagattcaattttagactaatcaattttttgttgtaatttaaacaactcatatttctcgaaagattctctttgattttcaatttttcttaacgtaaaaaaacaagcaactaccattacgatagtgcttgttttcaaaaattttataattgttttggtttagctaaaatttctgaccatatcataccattgattacttcatctttatcaaattggaacgctgatttagtcaaatctttttcgacattttgagaattaagcaactgctttaatttcaaacgttttgtacgttcagataagtatttatcctcaataatatctctagcacgtttttccattttagcaatttgcttttctttttctctatcaatgtcagtacgaatcgttttaatatcatctctaagtgatttttctaattgacgtctaatttcgtcagaattatcttgtctagaaggtctatgtttctgctccaccggttctgctttaggcactgtaattggtttctctgtcatcggttttgtttcttgttgttttttaggtgccataggttctacaacaggtttcgatttaggctcttcctttggaagttcatcgaataaaggtggtaacgtatcatcgtattttcgtttcgatgatttcttttcttcttcatttaattcttcacttatttctttaaacgttcgctcaatttcttcaaaaaagccacctttttttggttcattatcggtagatgttttttgaggtggcttttgattttgtctatctttatgactattttcgcgcatagtagtaatgatagaaatgatcactgatatgacaaaaattagaataccgacactcatttaatcacctctcgacttaatgttcaggtgactcatcatcactttgatcagttcgtttattaattgcatttctcatgcctgtatcagcttcgatatttttcaaattataataatctttaacactgatattacctgaacgtaatgcttcagccatagctaatggtacttcagattcggcttcaactactttagcatgcatttcttgtacacgcgctttcatttcttgctcagttgctacagccatagctctacgttcttcagcttttgcttgtgcaatatttttgtctgctaatgcttgttcagtttgtaagtctgcaccaatatttttactaatatcaacgtcagcaatatcaattgataaaatttcaaatgcagtacctgaatctaaacctttgcttaatactgttttagaaatattatctgggttttcaagtacttctgtatgatgcttactagaaccaattgttgaaacgataccttcaccaacacgtgcgatgattgtttcttcaccagcaccaccaacaagtcgagcaatattagctctaactgtgatacgagctttggctttcacttcaataccattcattgctacacctgcgataaatggagtttcaatgactttaggattaacagacatttgaaccgcttctaatacgtcacgtcctgctaggtcaatagcagctgcacgttcgaaaggaaggtcaatgtcagcacgttgtgcagcaatattagcgtcaacaactctgtcaacatttcctcctgctagataatgcgattctaattggtttgttgttaatgctagtcctgctttatgcgctttaattaatggcgctataacttttcttggagatacacgacgtaaacgcataccaaccaatgtacctataccaacatgaacgccagctgctaacgctgaaatccataaaccaatcggtacaaatgagaataaaataagtaatgcaactactataataactgctattacgataaaacttaaactaaacatggtatcgctccttttaattaatctacttccctcacaactactcttgttccttcaacttcaaggatttttaccgttttattgcgtaaaataaagttgccatctgaaacagcatcaatacgttcattttcacaaaaaataatccctgcaggtcgaagatctgtaactgtttgagcagtctttcctacgaggtgcgagcggttatcatgagaattgtaacctgactcagaattagttgaatcttttaagataactttatccaaaaacggaatctttctgttgaaaatcttcactaatatcacccattctacaatcgttaaaatcaaggcaacgataacattcgcaagcataaatagcaaattatcaccgagcgttgttatgcttatagttatcagtatcatgccaataataccaattactgcaccaactacaaataattcaattacaactaatataacgccaattgagaatattaagatagaatgcatattgacatttccttggattagaaatcccaaaaataaaataagtaatgataatgtggcgataataccagctgcattgatttttttagagtaaagttgatatacaaatcctaagaatgtcaaacaggttaatattaacgtaaaaataggttgaacaattatattactaacttgttcaacccaagtatctccagccgttgattccaagatagttgtcatttgtaaaaaattattataactcacaatttcacctcgccctcacattaattatacatgaaattgaatatactttatagttataagaacctatagaatatcaatttgattatttataaactatataatttttttaaattaaaaattgacaacaaaaaaaacatcacatattagtgtcagacactaacttgtgatgtttattttatataattaatattcgtgttgagggagtcaacagaggtattaattatttgaatttacgtttacgtgcagcttctgatttctttttacgttttacgcttggtttttcgtaaaattcacgtttacgtacttcttggattgttccacttttagaaactgaacgtttaaatctacgtaacgcatcttcaagtgattcatttttacgtactactgttttagacatctgtatttccctccctccaaatatcaacggaactttatagtcaattgcacagtaaaactatgcatttataagtataatatatctgtaatttatggtcaattagtaaattgttttttatttgaaacatatttcacatcaaaatcacaaagacttttagattttgttctaaaaatctcttaataatttatttaatgagaagagttgtttatatagtaaattgtgaagctgttaaaacaacgttacaaaacctatatctttaatacggaaccttatggtatgaatcaaggaatacttaaactaaaacttctctatcagatttatttgttgcgaaatcaacaactttaattgcttgcccttcatttaatggataatttgcttgcgtaattttaacttttacaatttgacctatgagtgattcgtcaccttcaaattgtactttcatataattatctgcatatccaactaatgtaccttctgtgtcaccctgctcctcaggaattacttcaagcacatcttgatcaaatttagacgcatataactttccaagttgattgctaagcgtaattaacttatgcacgcgttcatttttaatttcttcatcaatttggtcatccattcttgcagctggcgtgccaattctaggagaataagggaaaacatgcagttcagagaacttatgctttacgataaaatcatatgtttcttggaactcttcttcagtttcacctgggaaaccaacaattacatcactcgtaactgccaagtctggtaaagctttatgcaattttgttaatcgttccgaaaacctatccattgtatacttacgtctcatacgttttaatactgtatctgaaccagattgtaacggaatatgcaaatgacgcacaacttttgttgaacgttctaaaacgtcaatcacttcatctgtaagttgacttgcttcaattgaagaaattcgaattcgttctaatccattaatcgtttcaagatcacgtaataattgggccaagttataatcttttaaatcttgaccatatccacctgtatgaattcccgtcaatacaatttccttatatcctgaattcactagttgcgtcgcttgttcaactactttttccggatctcttgaacgcattaagccacgagcccatggaataatacagaatgtgcaaaagttgttacaaccttcttgaatttttaatgacgcacgtgttctatctgtaaaataagggacatctaattcttcatatttacgatttttcatgatatttccaacaccattaattggttggcgttctttacggaattcatcaatgtaacctaatagtttatgtctatcttgtgtaccaactactacatcgacaccaggaatttccataatttcagctgatgaagtttgcgcataacaacctgttacacagattacagcatcaggattttgtcttattgcacgtctaataatttgacgactttttttatcacctgtattcgttactgtacaagtattaataacaaatacatcagcattcgcttcaaagtcaacgcgctcatagtttgcttctttaaataattgccagattgcttcagtttcataatggtttactttacaacctaatgtgtgaaacgcaactgttgacataaatattcaccccattaattctttttcataacttattgcacttaacgcatacaatggcgcagtttctgcccgtaaaattctcggtccaagaccaacaactgtactagtattactaaataatgaaatttcattttctgacaaaccaccctcaggaccaaaaatcatcaacactttatcctgagccttgaattgttgtaaagtttgcttgaaattgcttaactcaccatcttttgcttcctcttcatgtgcaataagaatatagtcataattatcaatagtatcacaaattaattttaaattcgactcgaattgaatagatggaatcactaaacgatagctttgttcagcagcttctttaattattttttgccaacgttctatctttttggcaacttttgcctcgtttaatttaacaattgaacgttccatgctaacagctataaacgatgaagcacccaattcagtagctttttgtagcaaccactcatatttgtcagctttaattagtccactgcaaatcgtaacatcaactggcaattctgtattaatattttgtttttcttttaaatcaactgcaattttatcacttgttatatcagcaatttcacataaataaactgtttgatcattaaaagttaaaataattttactaccaacatcatatctcattacatttgttatatgatgaatatcttctttttttgtaataaaaaaacgctgacttacatcagcgttttggtctatgaaataacgttgcacattattcactcactttctggccaacaagacaaacccaaccgttgtcatgttgttctgaaataattttaaaacctacacgctccatatgtgactgtataccttcatacttctcttttataataccagaagtaataaaataaccgccttcatttagagtattataagcatcatcaatcatttcatcaataatatgcgctaaaatatttgctattacaatatcaaatttttctgtttcgtctttcaataagttacctggaacagcttcaattaacgtttcacaatgatttcttctgaagttttctttagctacactcactgccatttcatcaatatccaacgctttaatacgttttacaccgattagataacttgcaatacttaatatacctgagccagtaccaacatcaattactgaatgctgtggcaatacatatgtttctattgccttcaaacacatacttgtagtcggatgatctcctgttccaaaagccatacctggatcgagctcaatgcaaagctcttcatccgcttctttagcatatgtttcccaactagggactattgtgaacttcttcgacgctcggaatggatggaaatagtttttccattcattttcccaatccgtttctgcaatgatttgctcactgaattgaacgttatgttgatcaagttcatctaagtttaataactcatctttaattcgctgtcgcaacttatcatcataagtcaactcattaaaataggctttcaatcttactcccttatctggataatcctcttttttcaaagcgtaaatttcaccgtatttatcttctggttgattaattaaatcatatgaatcttctatcacgacaccatttgatccatgattttcaagtatattggtagccaattctactgcttcatgattaataataattgaaagctctgtccagttcatactttattctcccttaaagaatctttttgctctatctttaaaattcgaaggttgatcattaatttcttcaccatttaattgggcaaattctttcattagttctttttgtctatctgttaatttagtaggtgttactactttaatatcaacatataaatctccgtatccatagccatgaacattttttatacccttttcttttaagcggaattgcttacctgtttgtgtaccagctgggattgttaacataacttcattatttaatgttggtatttttatttcatcgcctaaagctgcttgtgggaagctaacatttaatttgtaataaatatcatcaccatcacgtttaaatgtttcagatggtttaactctaaatactacgtataaatcaccagcaggtcctccattcacgcctggagagccttcaccagctaatctaatttgttgttcattgtcgacaccttcaggtactttcacttctaatttaaccgttttattttcagtaccttttccgtgacatgttggacaagcttcttcaaattcttgaccacttccattacatttaggacaaacttgttcagtgcgaactctacctaaaattgtattttgttctacagctacatgaccagcgccattacagtaactacaagtctttttacttgttccaggctttgcaccatcaccatgacatgtttcgcatgttacatctttacggattgaaatttcttttgttgtaccaaataccgcttcttcaaatgtcaatgtcattgtgtactgaagatcatcacctttttgcggtgcatttggatctctttgtctgccgccaccgaagaaagagctaaagatatcttcaaaaccgccgccaccgaagccactaaaaccgccaaagtcagagccattgaatccttgtccaccaaaaccttgtggcccgtcatgtccaaattgatcatagcttgcgcgtttattatcatcacttaaaacttcataggcttcagaaatttctttaaacttttcatctgcaccttcttctttgttaatatctggatgatattttttcgaaagctttcgatacgcttttttgatttcatcttttgaagcatctttactaatgcctaaaacttcataatagtctcttttggccacagctatctctccttttcttaattaactcatatagtttaacgtaatatgtcatactatccaaataaaaagccaaagccaatgttctattgactttgacttttcagatcatgacaacattctaattgtattgtttaattattttttgtcgtcgtcttttacttctttaaattcagcatcttctacagtactatcgttgttttgaccagcattagcaccttgtgcttgttgttgctgttgagccgcttgctcatatacttttgctgataattcttgaatcactttttcaagttcttcttttttagatttaatatcttctatatcttgaccttctaaagcagttttaagagcgtcttttttctcttcagcagattttttatcttcttcaccgatattttcgcctaaatcagttaaagttttttcaacttggaatactaggctgtcagcttcgtttcttaagtctacttcttcacgacgttttttatctgcttcagcgttaacttcagcatcttttaccatacggtcgatttcttcgtctgataatgaagaacttgattgaattgtaattctttgttctttatttgtacctaagtcttttgcagttacatttacaataccgtttttatcgatatcaaacgttacttcaatttgaggtttaccacgttcagctggtggaatatcagtcaattggaatctaccaagtgttttattatccgcagccattggacgttcaccttgtaatacgtgtacatctactgatggttgattatctactgctgttgaatagatttgagatttagatgtaggaatcgtagtgttacgttcaattaacgtattcatacgtccacctaaaatttcaatacctaaagatagtggtgttacgtctaataatactacgtctttaacgtcacctgtgataacgccaccttggattgcagctcccatagccactacttcgtccgggtttacacctttgttaggttctttaccgatttcttttttgacagcttcttgtaccgctggaatacgagttgatccaccaactaagataacttcatcgatatctgagtttgttaagccagcgtctttcattgcttggcgtgtaggttccattgttcttctaattaatgaatctgataattcctcaaatttagaacgagttaagtttacttctaagtgtaatggaccgttttcaccagctgagataaatggtaatgagatttgagtttgtgatacacctgataagtcttttttagctttttcagcagcatctttcaaacgttgtaatgccattttatcttgagataagtctacgccattttcttttttgaattctgcaactaggtagtcaataattacttggtcaaaatcatcaccgccaagtttgttgtcaccggctgttgatagtacttcgaatacaccgtcacctaattctaggatagatacgtcaaatgtaccgccacctaagtcaaaaacaagaactttttcgtctttatcagttttgtctaaaccatatgctaatgctgcagctgttggttcattaatgatacgctcaacttctaaaccagcaattttaccagcatctttagttgcttgacgttcagcatcgttaaagtatgcaggtactgtaattacagctttgtcaactttctcacctaaatagctttcagctgtattttttaagttttgtaaaatcatagctgagatttcttgtggtgtgtatgatttaccttcaatatctactttataatcagtccccatatgacgtttaatagattgaacagtgtttgggtttgtaatagcttgacgtttagctacttcaccaacttgagtttctccatttttgaaagctacaacagatggtgttgtacgtgaaccttcagggttttgaattacttttggctcatcgccttctaatactgttacacatgaatttgttgtacctaagtctataccaataattttactcataataaaattcctccatttaatcattaaattaatttaattttaaacaatgtcttttcgccaaatttaagttattggtttactttgaccattgatggtcttaatactctatctttaagcttgtatcctttttgtagttcttgagtgatttcgccagattcaaaatcagggttatcatcttgaactacagcttggtgaatatttggatcaaatgcttcaccttcagttttaataacttcaagaccattatcttttagtgcgttaatcaaactttcatgcaccatttgtacacctttttgaagagatttaaaagtctcatcatcaccttcaatttgaagtgcacgttctatattgtctattgctggtaaaatatctgttaacacacgttgtgcttgatatgttttatttatttcattttctttttgaattctacgcttataattttcaaactcagcgtagagccttaaatatttctcttcgttttcatctgctaattgttgaagttcattaattttttgatcttttggatctatttcttcaataacattctcgtcagacgtttcttctattgcttcatcttgtaaatgacctttactttcttcagcttgttcaactgaatcatcaatattttgtttgacgtttgtttcttcaactgttgattcagtgtttttttcaactgattcgtctttatttgtcattttctgtcctccaatactttctaatccatcattaccaaattctatttaataattgaatgacattttgataatgcatagctgtaggtccaatcacagcgatttgaccttttaacgtttcatcaaaatgatattgacttgttacaattgaaatatcacttaagctgtcatcaatttcattaccaatttttacattaatatttggtgaagatatatcttgtaataattctgcaattctatttgattctatatattgtagaatgggctgaattgaagatacattactttcattcaatgcatcaataagtttaacctttccccccatataaatgctattactttgattagaaatatgattattcatcgtatttaacaatttattgataaatatttcttcctgctctgattgaacaaaagagacaatatcatcttgtaaattctgattaaactcagttagtttgttagtaacaaaatttgatattgtatttagtttgtcattactaaacggtatgtctgaagcaagatgtacatgctcaacatgacctgatgaaaatacgataaccataataactaaattaggattagcacgaatcaagtgtacattattgataatatcttgtttatgattaggatgaacaactaaagttgtatattgagatatatttgataattcatctgcaaaatatgtcaatgctgatgatacatcatattgattctcaactaacaattgatttaatcgtcttaatttatttgttttttgatgagatgtttgttcaagtaaacgattgacataatacctaaaacctaattgtgatggcgaacgccctgaagaactatgtgtcttttcgatatagtttaaatcttcaagctgtttcatctcatttctaattgtagcaggactaacattcaagttatgtcgctcaattagtgttttagaaccaacgggttgtccaaaatcaacataatcctcaacaattgcgtttaatatactcaattgcctatctgtaatcatgttttcacctcattagcactcacttatctcaagtgctaattataatttatcaaattggtcaaagtaagtcaatgttaaagactcgaaatttcaattttttttaatcatttattaggaaagcttcaaaaacctcattaccaatgactttccctcgatttgtaagtgcaatcgcatcgttcttttctacaattaatttcttctcttttaaattatttattgtttgaccaaagacactttcaattgattggtcaaacttctttttgaaccttctactactcacaccttcatttaaacgcaacccaagaaacatttcttcttccattctctcagtcaaagaaggtttatttgatactaaaattgctttactttctttatttatagctttgatataatgattcactggattgatattcgtataacgaacaccatctacataaccacttgcacctgctccaaatccataatattcctcattaaaccagtaaaccttattatgttctgattcatggccatctaatgcaaaattagatatttcgtattgatggaaaggagattgttctatcttagacatcagcaactgatacatgtcagcacctaaatcctcattaggaagtttgagcaaaccttttctatacatattataaaattgggttttaggttcaagtattaagccgtaactcgaaatatgttgaatatccatatctaaagctagatctaaactttgttcaaaatcttcaatcgtctgtttcggtaaatgatacattaaatctaaactgattgatttaataccggcgtttttagcatttaacaccgacgtgtaaatatcttcagtattgtgcgttctacctaaaacagacaataactccggcttgaatgtttgaacgcccattgaaattctgtttactccatatttctctaatagttggactttctctttagttaacacatcaggatttgcttcaaatgtatactcacctgtgattgtaaacgtatcacgtattgctttaagtaatctttccaactgattaatagaaagggccgttggtgtgccgccacctacatacatagtctttaagttcctatattttgctgtagacatttctgttattagtgcatctaagtactcatctacaggttggttctgtataaaatatttattgaaatcacaatatgtacatattcttacacaaaatggaatatgtatatatgcactttgtactgtcattttaatgccccgcttctcagactgtttatccaatcggctatatcctgttggactatctgcaattattcttacttttaactttaacgtttaatcaataattgtctaatatatcgattcattttaatatttataaatgttaagagggagtgagatagaaataataaagaaccactaatgatttattatgtagtggctcttacacattagccagaggtaatatgtacttaaaaatagaattacatgagttaaactcatgcataagggagtgggacagaaatgatattttcgcaaaatttatttcgtcgtcccaccccaacttgcacattattgtaagctgacttttcgtcagcttctatgttggggccccattgttataagctcattttaactctgtcgatgactgccaatataacattgtaaagcccaggacgttaatttatcctaggctccctctttttagttattaaactttattcattgtaaattgttaattgatttttaaaaaattattcgtcatccattttcaatacagccaaaaaagcatcctgtggaatttcaacattaccaactgctttcatcttagctttacctgctttttgtttttcaagtaatttacgtttacggcttatgtcaccgccataacatttagctaaaacgtttttacccattgatttaatatttgtacgtgctacaattttttgtcctattgcagcttgtacaggtacttcaaattgctgtcttggaattaacgttttaagtttttcaactaatgctttaccacgttcatatgcaaaatctctatggactatgaagcttagagcatccactttatcaccgtttaataaaatatccatcttcactaaattactttctttattttcgatgaactcataatcaaatgatgcatatcctttagtattagatttaagttgatcgaagaaatcaaatacaacttcagctaaaggtaattcataaacaatatttacacgaatatcatctaaatagtccatatttataaattgtccacgtttacgttgacataattccattactgcacctacatagtcatttggaaccatcatagttgcacgaacatatggctcgaatattttatcaattttatcacggtctggcatttgtgctggattatcaaccgtcacttctgaaccgtcccttaaaatacattgataaattacagatggtgcggttgcaattaattcaatgccaaattctctttcaattctttcttgaattatttccatgtgtaacatacctaagaaaccagttctataaccaaaacctaatgcttgtgatgattcaggctcaaattctaatgatgcatcattcaattgtaatttttctaatgcttctcttaaatcattataatttttgttatctattgggaacagtccgcaatataccattggattcattttcttataaccttgcaatggttctgatgcaggtctactagctaatgtgattgtgtcaccaaccctagaatcatcaacatttttaatacttgcaataatgtaaccaacatcaccaactgttaattcatcaactggaagttgcttaggtgtattaattccaacttctgttacttcgaactctttaccagtggccatcattcgaattttatctccggctttaacaacaccgtctacaattcttatcgatgaaattacccctctatatggatcatactcagaatcaaatattaacgcttttagtggtgcttctgggtcaccatctggagctggcacaacttcaactattttctcaagtatctcttcaattccaatgttagatttagcacttgctaaaacaacatcgtcttggtctaaacctatcatatcttcaatttcttgtttcacgcgttcaggttctgcagcaggtaaatcaattttgttaataacaggcaataactctaactcattatctaatgccaaataaacatttgctaatgtttgtgcttcgataccttgagccgcatctactactaaaatcgcgccctcacaagctgccaaagaacgtgacacttcatatgtaaaatcgacgtgtccaggcgtatcgattaaatggaatgtataagtatttccatctttagcttcgtactttaaacgtactgcgtttaatttgattgtaataccacgttctctttctaaatccattgaatctagtaactgatcttgcatatctcttgtttcaactgatttggtattttctaaaattctatcagccaatgtagattttccgtggtcaatatgtgctataatcgagaaattccttatattctctcttctttttaagcgttgctcattatccattttatccttctcactttcataaaataaacccgtattatctttcgcatctttgatataataacgtttttaataggtaaatgcaaacgccataatcttggatgaactttgaatttataacaatctttatttaaatacatacttgcgatatgttaatatgttaattacgtacttataattataaaacgtattgattgtgtttccaacacaatttattaaatctgcaaaattttaagctaaccccatcaaataaatgattgcacaacggttagacttttgttaaaatatttcttgttgtaatcaaataaaattttgataagatgaactcacttttaggaggtgacagaaatggcaaatatcaaatctgcaattaaacgtgtaaaaacaactgaaaaagctgaagcacgcaacatttcacaaaagagtgcaatgcgtacagcagttaaaaacgctaaaacagctgtttcaaataacgctgataataaaaatgaattagtaagcttagcagttaagttagtagacaaagctgctcaaagtaatttaatacattcaaacaaagctgaccgtattaaatcacaattaatgactgcaaataaataatctttttaaataaaagttcaagcgcatgcttgaacttttattttttataaagatagaatgaataattccagtattaactgtttatccatatatgatgatttaagtttataatcagtttccgcacaagcatctataatattcaataattcatcaagttgataatgtcttacttgtcctaacgctaattttactctgtatggatgtacgcctattgttttagcaatttgctgtccactatatcctttttgactcagaatcttacattgataaaataatcggtaattacttgtaattagtgcaagtaatttaataggttcttctttcattgttattaaatcttttactaaatgaattgcttgttctttctttcttttctgaatgtattcagtcagtaaaaatacattttgttctaaacttctattaataatttggttaacatcctgcttattaattgttggtctatcgcctaaaaataaaatcaacttttctatctcttgtgagacaatattaaagttaatacctgtcaactcaataaataaatctaatgcatctcttttgatatctttgaaattctcatttaatttactttgaatccatttttttatttcttcttcagacatttgctctatttttttaagccttgcatgcttttttagagttttagttaacttttttctttcatcaagtttattttgatatatctcaaagacaatcaaattttcgccatcatatttttcaataaattctattaattgatctacattatgagccatatcttttggcgatttttcacctgtaaatatatatgcatttttaaccaaaattgcttttttatctgaaaagaaaggcaatgttaatgtttcttcaacaattggtgcaatctctgtttcgtataaattatatttcacaaagttaaagtcatctctatcacttttcaaaaattgtgatatgatttctgcactttgtttttcaaccaattcaggcacatctccataaatagctacaatattgtcgctcattcagtacaccctttcattcgtttgacacatcaatagattatatcatgtttctgtatctataaaccacttgcatttccataagagtttgaatcaacttttaaattatcatctaagtctattgtaacttgaccgttttgttggctattgtaaatgcgactgcgaatcctttgcaatcgtttaacaacttctatgttaggaagatgatacatattgttctttccagaagaaatcaaacttattttaggcttaatcatctctataaattctttagaactacttgtcttactcccatgatgtcctacttttaaaatatcaatctccggcaaattatatttttttagaagtaaagattcattatttttactagcatcgcccattaataaaacttttttattttgatatgtaatcatagtaataatcgagtattcatttttatctcggctatttggaataaaactatcaaaaaatagaaaactactatctccaagtttaaaactactaacttgccttacatccataagtttaatgttatacttatggcttaatttcgataataacatcaatgtattactactatatcccttattgtatatcactatatgtttaattttaatatgactaataatatattccaattcaccaatatggtcattgtgtggatgtgttaaaattagatactctaattcatttatccctctctcatttagcgttggtaaaatatgatatttagaaattgaataactaggttgtttagtatcatcaatcactttcccacctgtatcaatcaagacattttggttcttaccaccttcatataaaatactgtctccctgccccacatttaacattgtaattttgtgatgtgaatttgttggaaacgttattaataatgtcagaataattatagtccaaaacgtaaccaatatatatttacgtttagccaataaccaaaatatgtaataaacggaaattataaatattataaatatccaatcattaaacttgggaacagaaaaatgtgattgcttgattcttgtgaataggtctagtaaccagtcatgaaaattaaaacttaggtcaaccaagtaatttagcggcgttaatcccacaataaaatgacttgtaataaagaataaaatagatagaggaaacaatataatcgaatagtatggtacaaaaatcaaattagataaaaatcccacccattgaagttgatgaaagtttggaatggcaacgataaatgaagctaattgtgcaataaacgtaattatgaataatgattgtaacttcgacaattgctgtaaaaaaggaaaaagtaacataataaaaaatgaaatgatgaatgaaaattgaaatccaatatcataaacaactagtggatttaaaataaacataattataaatgcaaatgctaaaagctgaataccctttattttaatttgattagtaataagcagtacaagcgttgtcattattatagctcttacagcactaggtgcataatttgtgtattgagcaaataaggctaatacaatgattgtaattcctttaatgacaaataaaggtaaatttaatcgttttaaaggttggtaaattaagaatacaattgcagctatatgcgagccactaactgccagcaaatgatatatacctatttctttaacacgttccttaaattgctcattaatttcttttacgtcaccagtaatcaatgccataatacgatccggaaacttaatacccgaatcataaattcgattcattataaactgtttatgtttctcaattaaattagaccggttcgattctaggcagctttgtacaactatactttgtaatttaagagttacaaacttattgtcattaactttgaattgtcctttaacaatacaattacgactttcaattttctttaaatcaaaattctttttatttgttaaaaagaaaggatatatttcattttttaaactcaacctacctttatatgtgtcactaccttgacgttgaatttggattacttgagcacgctcattaaactgagaattacgttcaatataattgatataattaaatattgcttgttgtgaataatgtaaataccatgaggagaaaatgattaaaaagagagaaataggggcatatacgattttatttttacgataagcaatatacaaaagtaaaataaaaagaaatgtagagagcactttgctagaattccaaagcactcctacaatcattgataacgcgacatacagcaaaacatcaacctttagtcagatattcagcaacatattcaggtgaaaatggaatttttttaaattcaataccagattgtttgagtaatttagttgcatattcatggttatgataatcttctgcatagtagatacgctttatacctgcttgaataattgactttgtacaatttaggcatggaaaatgagtaacatagattgttgcaccttcagtagatacaccttgttttgcacattgtaataaagcattcatttctgcatgtatcgttctgatacaatgtccatcttcaattaaacacccttcatctatacaatgcacctcgccagctacagagccattataaccaccagcaataatacgattatccttaacaatcgttgcacctacagataatctttgacaagttgaacgtaatgctagcaaatgactttgtgccataaaatattcttcccatttgattctttccaagatgttcaccttccatacttaaaatttagtaacattttctaataatataagattaatcacaaaaaataaaatttgcaattaaaataatccattatgtcgtgaaataagaattcagtttatcaaaagttttacttccaaaaccttttacttttttcaaatcgtcaatttcttgaaatgcaccttgttggttgcgatattcaacaattgcattagctttagcttgccctactccaggaacagacatcaattctgatacagatgccgtatttaaatttactttagtattatttgtgttcccattttttacgtgcacactgtttgctccaaattgtggttcaacattcttttgtcctttatgaggaatgaaaatcattttttgatctgttaatttttcagacaaattaatttgacttacatctgcatcatctaataattgtgctttatcaagtaaatcaactactctatccttagatgtcattttataaacattaggatgtttaacagcaccttttatatcgacatatacaggacctttatttttggaattatctccatctttgacctggacatcttctaatttggacaaactactattttcactagtgctttgtttcagaacagtatctttattttcaaaatctcttgaagtataatcatcttgtctccagaatataaaaccaattaataccataattaaaacaacagcacttataatatataacttccattgagctaaaaaatctttatagcgtaataaaaattgatacaataaaaccactcctcaactttatacacgtctgagcgagtggttttacttttattttttcgcaatgaaaaacaatctttctgcatcttcattatgttcatctatattaaaatcagtaaatgtttcaacatgtttaaaaccaacttgagttaaccaagacaaatatgtcttttcatcaaatgttctctgaaaatgagactcgtcaaatcttgaatatgtttcatcttcatgtcgaatgaaaaatgtcatatcatgataaacacttaaaggtaaatctccttgcacagcatcccatgctaaaaaaatgtcccctttatcatcaatataactttgattattaaacaaagtcatcattttataaacagtatgtacatcaaaaataaatacacctgaatcagccagatgacgataaacattgatgaatgtttcaataacagcagtttcatcttgcaaataatttagagagtcacaaaaaatagtgatgatatcaaattgttgttgcaaatcaaacgatgtcatatctccttcaagccaatttacatttgctgatttttgagctgcaacagtcaacatatcaacacttaaatccataccagtaacattacctaaagcttctaattgaactgttaaactaccagtaccgcatccaatatctaaaatatttgattcatctttgcagtgattttttacaatttcaaaccatttttcatatggttgatcttgagtcaattgatcgtacactaggctcatttctgcatattgcgacataattaatacgcaacctgaccatatgattctaatggtgcatcttgatataacttttcaatattataataatttcgttcgtctttatggaaaacatgtaccacaacatcagctaagtcaattaatatccaacgcgcttcattgtaaccttccatacgttttacttctatattttgttcattggctacttctttcaccgctctagcaatcgcttgaacttgtcgttcattatttccgtgcgttacaacaaaataatctgtcatatcgctgatacctttcatttctaaagaaatcgtatcttcgccttttttattgtcaattgcatccacagcaattgctaataattcttgtgaattcatttaatcatcctttattctttcgtcactatagttataataatttaaacagtcaattgtcttattatataccgtaatatctttctgtattaaaaatagtactgtgcgtttagaaatttcataaattgtcttatctaaactaccttgattgtatgccatatctcgaatatcatcaactcctgggattgttctaccaggttcgatgtaatctgcaataaaaatcagtttttcagtttttgtcatttgttgacgtcccgtagtatggtatttgatagccattaatacttcctcatcattgataccatattcatgttccatgattgctgcacacactgggccatgcaatatttcactaccataactcagtagatcattacctaattcgtattgtcgaacaatttgatacattttacctaaatcatcatatttacagaaatcatgtaatacacctgctaattctactttactagtgtctccatcataaatttctgctaatttaatcgctgtttctgcaactcttaaagaatgattataacgtttctctggcagtttctcttttgcaagccgttttgctttttcaatgttcatataatccttcccccttaatatagttttcaacggatttaggaacaagaacttggatagatttacctttactaactctttgtcgaatcattgtcgaacttatatctaccctaggtatctgaattgcaatcataccattttcaacattttgactatttttgtctcgatttacaactacaaaagtaaccatttcttttaagtattcaatttgataccatttctctagttggttatactgatccgtcccaataacaaagtacaactcactgtctttgtgttgctccttgaatgccttgatcgtgtcataggtataactttgaccaccacgtttaatttcatcgtcgcaaatatctccaaaaccaagctcgtcgataaccatctgtatcattgttaatctgtgctgaacgtctataaaatcatggtgctttttcaatggagacataaaactaggtaaaaaataaaattcatctggctgtaattcatgaaatacttcgctagctactatcatatgtgcagtatggatagggttaaactgaccgccgtaaagtactatccttttcattattatggcaattcaatttctttattttctttagattctctataaatcacgatcatagatccaatcacttgcactaattcactatgcgtagcttcgcttaatgtttcagctaattcttttttatcatcaaagttattttgtagtacatgtactttaatcaattctctgttttctaacgtatcatctatttgtttaatcatgttttcgttgataccgccttttccaatttgaaaaatcggatcaatattgtgtgctaaacttcttaagtatcttttttgtttgccagtaagcatatgttattctccttttaattgttgtaaaactgctgttttcatagaattaatatcagcatctttattagtccaaattttaaagctttccgcaccttggtaaacaaacatatctaagccattataaatatggtttcccttgcgctctgcttcctctaaaataggtgttttatatggtatataaacaatatcactcattaaagtattgggagaaagatgctttaaattaataatactttcgttatttccagccatacccgctggtgttgtattaataacaatatcgaattcagctaaatacttttcagcatctgccaatgaaatttggtttatatttaaattccaagattcaaaacgagccatcgttctattcgcaacagttaatttgggctttacaaattttgctaattcataagcaatacctttacttgcaccacctgctcccaaaattaaaatgtatgcattttctaaatctggataaacgctgtgcaatcctttaacataaccaataccatctgtattataccctatccacttgccatcttttatcaaaacagtgttaactgcacctgcattaatcgcttgttcatcaacatgatctaaatacggtatgatacgctctttatgaggaattgtgatattaaagccatctaattctttttttgaaataatttctttaattaaatgaaaatcttcaattggaatatttaaagcttcataagtatcatctaatcctaaagaattaaaatttgctctatgcataacgggcgacaaggaatgtgaaataggatttccgataactgcaaatttcattttttaaatcaccttataaaatagaatttcttaatacaacatcaacatttttaggaacacgaacgattactttagctcctggtcctatagttataaagcctagaccagagatcataacatcgcgtttctctttgcctgtttcaagtctaacagcctttacctcattaagatcaaaattttgtggatttccaggtggcgttaataaatcgccaagttgattacgccataaatcattggccttctccgttttagtacgatgtatattcaagtcattagaaaagaaacaaattaacggacgtttaccacctgatacataatctatgcgcgctagaccgccgaagaataatgtttgcgcctcgtttaattgatatacgcgttgttttatttctttcttaggcataataattttcaattctttttcactaactaaatgcgtcatttgatgatcttgaataatacctggtgtatcatacataaatgatgtttcatctaatggaatatctatcatatctaaagttgttccagggaatcttgaagttgttactacatctttttcaccaacactagcttcaatcagtttattaatcaatgtagatttcccaacattcgttgtccctacaatatacacatcttcattttctcgaatattcgcaattgatgataataagtcgtctatgccccagcctttttcagctgaaattaatacgacatcgtcagcttccaaaccatattttcttgctgttcgttttagccattctttaactcgacgtttattaatttgcttcggcaataaatccaatttatttgctgctaaaatgatttttttgtttccgacaatacgtttaactgcattaataaatgatccttcaaagtcaaatacatccacaacattgacgacaataccctttttatccgcaagtcctgataataattttaaaaagtcttcactttctaatcctacatcttgaacttcgttataatttttcaagcggaaacaacgtctgcaaatcacgtcatcaccaaacatattatgctctggtacaaacccaggtttatttttatcttcagattgaagtggcgcaccacaaccgatacattttaaaatgtcagacaatcaattttcctcccatgtgatataaccttttttactgaaatgacgtaataatcgtctttcaattaatctattaaacttagtaataaagccatccgttcgtttaactggaacgaccataattgtatataaacctcgacggttaccaccaaatacatcagtaagcatttggtcacctataacaacagtttgatcaggtcttatattcatcttagttattgctttatcaaacgcttttcccattggctttctcgctttaaaaataaaatcgatgtctaaatgctgactaaaactagcaacacgagactcattattattagacacaattgtaatagtgattcctttttcattagcttccttaaaccatgctttaacacgttctgtaggttctttaacatcccaacctactagcgtattatctaaatctgtaataatacctttaacgcctttgtccactaacttgtctaaatcaatttgaaatattgattgaacatatgaattcggcataaaaaacttgcgaactaaacccatttaactcacctttacctttttataattgagacactaatgcttcaacagtttgacttgatgataccgctgctttttctaaaaatgcttcgaaactcatttccgcttctccatttgctaagtctgaaactgcacgaactacaacaaatggtacattaaattgataacatgtttgtgcaattgcagttgcttccatttcaaccgccatcgcatttggaaatgcttttttaattttttggcgttgttcaacactaccgataaagctatcaccacttacaattaagcctactttagctgttaattgttgttgttgtacaacttgagatactttttctattaaaggtttacttgattgaaatgctaccggcatctgtggtacttgtccatattcataaccaaatgctgttgcatccgcatcatgatattttacatcatcacttataagaacgtcacctacatttaaactttcatctaaagctccagcagaacctgtattaataatgatgtccggtttaaacttattaattaataatgtcgtagaaattgcagcattaacttttccaatgccgctttgggtaatcactacttctctatcttttaaaatgccagtataaaatttaacatgtgcaactgaaatttcgcttaattgtgttaatttattttttaatattgttacttcttcttccatggcaccaattataccaatcatcctttgattcacctcttttaaaaaatcctaacatttgttattttatcacattttaatcactacaacgacaagtatcatgattttcattactgtataaaacttttgctttatttttataaaaagctttcacaataccttggtatcataaataattatttatgaactcataacagtgaaatagatgcttctaatttgtgtatttttcaaaaactaatcatatcaattacatcaaccaatagtgtcaagaaactttattaaataacaggaaaatgatatgtttaaaataataatgatgaaataagaggattttacaatggctgaaaataatcaaaatagtctcgtaacaaagatagctacatacggcagttttattgcaattgcgtcgtttgtcattttatttataagtatatttttaaagttttcatttaatatcgagtttacagcaacaattatgaacatatgtcgctacactctaattctaggatttatacttatgtccttacctgatgttgttgataaaaacattaagaaaattatattcgatgcatttattatcatcgtctttatcttctttttactatagtagttttattttgtaattatacagttaatcatatttgtttcgtatcgaattcctgtgtgcattaaagattattctaatagaaaacagcagtaagacttttctgagtaatagcctccttactgctgtttttatttgtaacaatataatgacaggtactttatatttcactgtcaaagatcattaatgattaactcacttaaattatgatttgaataaatagatatctaaatgcaatttgtcactattgatagttttattatcagcatacatttttaatacctcatgaccatactcaccatttaaattataaaaatcatattctacatttttttcatcatcattatgatatttaacataccctttaacaatgtcgccaccttgttcgtacaacttatacttctcattcaaataatttcttaattgaacatctaattcttgaatggtaacaatttactttttcgttttcactgcagttagttctatttctgtttgatgtccgtcaatccataaattacaaggtatattcttataatcatcgtatttattattgtcacttaaagtaacaccaccataactacattgcgttttattggtttctcccccatgacattcatagctatagcttccagcatatacatcaatattcttatttataaatttctttgaaagtgcctcattttcgaattcaacttttaaatcttttttccaagcatcatttaagaacatgtcatgaaataacaaatcatgcttcaacagtctatcatttgtttttttattttcaagatcagttggattagcaaatgacaccttagcattatatagacgcttggaatcaagtttacttttatgatgtaagtctgaatattcgattgcacttgctgaatttgtaaaaattccttctaacaataatattaaaataaatcctgttaaatattttacttcaaactcccccaaaacaattattaatttacatttgagagcgagacataaatgataaacaggctaggaaagaaatcaatgttctatgctctacgaagttatattggcagtagttgactgaacgaaaatgcacttgtaacaagcttttttcaattctagtcaaccttgccggggtgggacgacgaaataaattttgcgaaaatatcatttctgtcccactcccttgagcctacaattttgatttatgtatcacactcataatacttttcaatttgaaatactctgttcgcaattattagttgagttatatcaaccaatacagtgtaaacttaaaaattccaaaccgtttaacagtatatcagaaaaaatgataattatttcaattatttttattaaatttcataatgattcatataatattcgaattaaaacatcacaatactgatacacaacaaaaagagcagtacacttgtcatgcaccactctcaacaaatatattttttaatgaagcaattacgcaatcttacaaatacaataagtatagctgaatcacatattacatttattttataatcgaatttagaaattcatcacttatctcataaattgttggtctacttttaattttaactaagtagttaccaaattttttaattgtattattaatttttactcttcctactcccaatatgttttctaaatcaattaatgttaatctatttcttttatttccaaacaatttatccattgaaaggagatacaaaaattcataatctatctttttataatgactagttaaataaagcgttaatttttcagtcgcatccatttttggtattaactcatcaagtattctttcttgtcctgctatcaataactcaagcattgtgtcaataaattccgtcaaatcaccacaattcaaatgatttgaagcagtcataaacgccttgtaatatttcgatttattcctatttataacatatgaaaatgtcaaagcagtataattatcataataatcactcaagagcttggcaattataaatcttccaactctaccattgccatcataaaaaggatgtatatattcaaacatataatgactagccatgattttgaacggctgaggcgcatcaaaatattttaaaaatgttagcatttcacctatatattcaacaattttggtttcaggttgtaacccaacatgtatatatttattcgttgacccatcatgcacaccgacaaaatttttacgaaatagctctccatctaacttatcttgttcgttaatttcatttgaaactaatttatcataaatcgctctaatgtctcttacattatcaactttaatttttttattaagttctatctctttatattgatccacgaggcccctgaacttaagaaagtctgatgcttggttatttaacgcatgtgcaatctcttgtttagtactaaatacattttcaatttcattagtactttgtaattcatcgattaataaatcattaaaatattgttctctagctgcatatggtaaagaattaagtgctctatcaatttttctactattaattgatattaattcttgtttttttgatagatttttagtcaccataaagaatagaggatattccaaatcattaactttttttccattttccataggtatgatattaatattagtattgaaagatgctaaagaattaaatcgcttaatatactcttccttcattttactttcattgtgttcatgaaaaatactttttaaagttctgtaacccatttgcagcctcctctactcatttaaaatgtatttttagtccaataaatccattttcattagattagctaaatattatcactttttttctttaaaaactatataaataactattttctcaatcaatagaaaaagatttttcatcataacaaaaagagcagtacacttgtcatgcaccactctctcttaaaatatatctaattatgctgtataaatgaatcaccgataatcaaaacacatttcggcctaatactaacaacatttacagtgatgctattagtcgaaatgtcttttaaaataactgaagcacttctttgaatgagaatatacctgtcaatattgtaacaagtactgcaacgataccaaagatgaacatccaatttgggtgtttataatcacctacaattgatttctttttacttgcaatcaaaattgcacctaacgtaataggtaaaatccatccatttatcgcgcctgctataattaaaaggctgattggttttccaataaataagaaaatcattgttgaaataacgataaacacaatcacaattaaattacttctttctttaagtgatttatgaagtgtttttaaaaatgttgcgcttgtgtatgctgagccaattactgatgacatagctgcagcaaataacacaataccaaaaatattctttccaattggtccaattgcgtgttcaaaaactgacgctggtggattttcagaacttagtgtcacacctgttacaacaactcctaataccgctaggaaaagtaacgttctcataatacctgtagttaaaatacctgcaattgctgattgatttacaaatggtaaatattgcttacctttaatgccagagtctaatatacgatgtgcacctgcaaaggtaatataaccacctacagttccaccaactaacgtaatgattggcaagactaatttcattggatgttctggcgcaaatgtatgcacaaaagcatcaccataaggtggattagaaacaaacatcacatatgccacaactaaaatcatcacaataccaagaatcattgaaacaacgtccataattttttgtccacttttacttacaaagattaatattgcaaagattgcagtaatagctgcgccccattttacatctaatccaaaaattgcatttaaacctaaaccggcaccagcaatattaccaatattaaaagctagaccaccaaatgcaatcaatattgagataacagtaccaagcccaggaacaactttatttgatatttcttgacctcttaaaccagttacaactaatatgcgccatatattaatttgtgcaccaatgtcaatgataatagacagtaatatggcaaatgcgaaactcgccaaaaattgcgatgtaaatactgccgtttgtgttaaaaatgctggtcctattgcagaggttgccattagaaatacagaacctaacaataatctcttatggtttttagtaaattcaaaatcactttcgcgatgtttaagctttaaatttctccccattttttagccccctataaggattgaatatcaatgccttctttcattaaaatttctctaattttcgaaacaaataataatgcatgttctccatcaccatgcacacaaattgtatctgcttgtaacgttacttccttattgttttttgaaataactttattttccttcaccatcttcaaaacctgcttaagtgcttcgtcagtatcagtaatcacagcatcactttcttttctactaacgagctgcccatcatcttcgtatcgtctatcagcaaacacttcagaagctgtaattaatccgacattctttgcttctgaaattagatatgaatttgctaatcctactaacactagtgatggatcaaagtcataaacagcttgtgctataacgcttgctatttctctgtcttttgcacccatctgatacaatgcaccatgtggtttaacatgattaattttaacttgatgaatgcgacaaaacccttgtaatgcacctaattgataaatcatcaaattataaatctcctcgttagagatatctatatttcgtctgccaaagcctttcaaatcaggtaaaccaggatgtgcacctactgcaacattatgtgctttggcaagttttaccgtttcattcattacattttcatcaccagcgtgaaaaccacaagcaacattcgcacttgtaattaacggaataatttgatgatcaccaccaaaggaataatttccaaatgcttcgcctaaatcacaattcaaatcaactcgcattataattccacccctttaacaatttgatgtttttctaaaaatttaatatcaacatcttttgcatctccatcacgatatagtggataatttaaaactgcatataaaaaatcggcagttgtagaaaatccatctatcaccatttcatctaaggtagctctcaatttatcaattgctgaagctctatcatgagattttacaattactttagctactaaagaatcataatatggtgaaacttgataaccgtgatatagtaaagaatcgactcgcacattaaagccttgaggtaaatgtaacgctgtcactttacctggtgttggttgaaatttcttttcaggattttcggcatttattctcgcttctatcacatgaccattaaattgaatatcgttttgtgaaaaaggtaaatgattatgttccaataaatacaattgtgctgcaaccaaatcacgttctgctcgcatctctgtaacagtatgttcaacttgtattcgagcattcatttcaataaagtaatgtgcgttatcagttactaaaaattcaatcgtacctgcacttctataatttgctgcacgtgcaactttaacagcatcgttacatatttgttgtcgtctttcttcagttaatgctgcacaaggagattcttcgattaatttttgatttttacgttgtacagaacaatcacgttcccctaaatgtacataattatcctgcccatcccccataacttgaacttcaacatgttttgcaacaggtataaaagcctcaacataaacacgatcatcatcaaagtatttttttccttcacttttagcttctttaaatgccttttctaaatcttcagctttctttacaatacgtatacctttaccaccaccgccactggcagctttgataacaactggataaccgatgtctttggcaagcttctcaatttcagacacatgattcacagcatcatttgatcctggaatcacaggaacacctgcatgatgaactgtttgtcttgctgttattttatcccccatcatttccatcgtttttttagtaggccctataaacgctatgccttgttcctcaacggtttgagcaatttttgttgattctgataaaaagccatatcctgggtgaattgcattagcaccagtgatttgtgcagcagatatgatgcggtcaatatttaaataactatctaaagcattagcttctccaatacatatagcttgatccgctaaatgtacatgcaagctttgctcgtccccttttgcataaaccgctacagtttcaatcccatattctctgcaagctcttataatccttacagcaatttcacctctgttcgcaattaaacaacgaagcatttacttaccccctttacttaatacgtaccaaaacttggtcgtattcaacatttgtgccatgatcagctactatttcagtgatttctccagcaacatctgttgttacctcgtttaatactttcatcgcttcaacatatcctataatatctcccttgttaactttgtcaccgactttcacaattggttcagttaattctttactgtcttgtaaaaagaatgtacctaccattggtgatttaatgtcatgataatcatttgtcgaaacatcggagttatcattcacttttgaagctgtcaaatcattattgttcatactttgatttgattgattactgtgtgcagccaaatgattcgaatcagtgaagtcaatttctatttcatcttcaaaatttttatatttaaatttcttaacatcattttccttcactaatttgattatttgttcgattttttcaatattcattttacaaatccccttttaaaattgttgctaattttttcgaagtatgtcgcaagctagatgtatcaaaaattggagtcttttgatgactcttaagaatttcattaaacagagacatttgttcccgattcttatctacagcttcttggaatgatatccatttaaattgaattgtatcttgtggtttcatctgtgctaactttggcagatcaaatttgcatacagttgcaattttggtataaccacctatcgtttgtttatcattaagaagaataataggttgaccatcatttggtacttgaacactgccaagagcaaccggttcagaaatgatatctgcttgattaataggtgcaacgctgtcaccttccaaacgataccccatacggtctgattgttcggtaattaaatatggatgatttacaattttcgctctagcctcttcagaaaatgcctcgaattgaggtccttgaagaatgtgtataatattattttctggcaataaatcgtcctgtaaatgaatagtctttccaatgttttctttaaagtcattatttattttcactgttattacatcattagctaataactttctacctttgaatcctcctatactacttcgggtatgtgttgcataactttcagcaattggaggtacgttgatagtatgaccaaaagtaagataaccgcgtgcacctttggttatagcacctatttttaaaatgtcacctttctcagctaatatgacagaattcattgatatagttttattatttagcgaggcattaacactaccaccggttataacaaatgtattttgcgtattaaattgaatggtaggaccaatcaaagtatattcaatcgctggaccatcattgttaattaatgactgcgcaaccttaaaactaaattgatccatggcacctgcgcctgaaaatccaatatgttcataaccttttcttcctagatcttgtaccgttgaaaagagacctggttgtaaaatcttaattgacattttcgatcaccacccagtcatcaacattaaagttgccatctgatatatctctttcgatttgtataaattcctgttcatctattgcataaaattgtatccattctcctgcttcatacattgacattggttcacgctcgctgctaaatacttttaacggtgtgcgtccaataatttgccatccgccaggagaatctgatggatatagtcctgtttgattattcgcaatacctacagaacctgcatgaatttttaaccttggctgattacgtctaggtgtatgtagttgttcatcaagtccgcctaagtatggaaatccaggcataaatcctagcatatatattaaataaggtttacttgtatgtttttcaataacttgctcaacagttattcgattatgctttgctacttcttcaatatcaggtccatatgtaccaccatattgaacaggtattttaataatactattggtttgattcacagcatgaacatttttttcattaaatttgttaagttctaaattttcaattaatttagaaggtgttatagcttgttcatcaaaatatattagaactgctcgatacgaagggacaatatcttgaatttctaatatttctttttctcgtatccaccgtaccattgctgtgacatttcgatatgtctcttcggatattttattttcaaaataaatcataatcgtctgctcgttaataaatcttacatccactctaaatccccctttgtattgcaataaaccagtattgaataccttttcattgtatcattgagaagcacaagttgtttaataagtaattcaaatcgcatacaataacaaatgataatcaatttgtttcttcggaaatattttgcttttttaaaatggagtagttaatattgaaactcttacactaatttagattctgctatcaatcggtctgatggaaaattttcacttttcatctgtccgatttttttattttgaatataaaaaagcacgaccgaagtatcattaacacacttcaatcgcgcaattaaacaatctatttgatcatttattggatattaacaatttttacgttcatttcgccaccattaggtagtggaacacgcacttcatcatctaaacctttaccaattaacgctttagccattggtgattcatttgaaatcttaccattaaatgcatctgattcagctgaaccaacgatttgataactttcctcttcatcacctggtaattctacaaacgttactgttttaccaattttaacaacgttgttatctccagtatcttcaatgattaatgcatttcttaacatatgctcaattctttgaatatcttgttcgatgaatccttgttcatcttttgctgcatcatactcagagttctctgataagtcaccaaatgaacgtgcaactttaattttctctacaacttcaggacgcttaactgtttttaattcttcaagttcacgctctaatttttcaaaaccttcttgagtcattggatattgcttttgattttccatattgtcatcttcctttactgaattatactattgcttgctaactaaagactgaatttttgttgtcataatatctattgcaactttattgctcccaccttcaggaataattatatcagcatatttcttagtcggttcaataaattggtcatgcataggtctaacaacacttaaatattgattgataacagagtccattgaacgcccacgctctttagtatctcgtgttaaacggcgtaatattctcaagtctgcatctgtatcaacatatattttaacatccatcatatcacgtaataccttattttctaaagcgaaaataccttctacgataataacatctttaggtttaaaatcaatggtaatgtcacttcttgtatgactagcataatcatatgtcggtacttctactgctttaccatttttcaagtctttaagattttcaattaataaatcattatcgaatgcaaatggatggtcataattggtttctaggcgctcgtcgaaagtcaagtgcttttgatctttataatagtaatcttgagcaagtaaagcgacactatgaccttctaagtttttcataatttcgttagttacagttgtttttcctgagccagatccaccagctatgccaatgattgtagtagctttcattagccaatttcctttctcatcatgttgtttggatatatcgggcgatccactttaatttgaacgatttgtaatggatggcgcgccgcgtctaagctgttaccttcttcatcataaattgcttctactacttgtgtaaatgtttcaatttctggaccaaagaattctatttcttgacctggtttaaagttatttcgttgttgaatagtcgcaatttttgtatcttcattataatctaataccaaaccacaaaaatcaaatggtgattttttagattgttgttgaccaaacatctgttcttcataaccaggtgttccctcaaagaatgcaggtgcagtgtctctatttgcacatttatctaactcaattaaccattccggattaatcttaaagttgtcaggatctgccgcatacgcatcaatgactttacgatatactgagacaactgttgcaatatagtgaattgacttcatacgtccttcaatttttaatgagtccacaccaatatccatcatttgaggaatagattcgattaattttaaatctttaggactcatcgcaaatggtgtaacttcaccttgattataaaatacatcaagttcaccattatcatcaacttctaataattcataatcccaacgacaactttgacagcaaccgcctctgttggaatcccttgcagtcatatgattacttaatgtacatctacctgaataggcgatacacatagcaccatgaataaatgcttcgatttcaatatctactttttccttcatttcacgcatttccatcgcgccggtctcacgtgctaatacaacacgatccaatccttcttctttccaatattctacagctttgtaattagaaagtgattgttgagtagataaatgaatttcaagttttggcgcaacttctttacatgtttcgataattaaaggatctgcaacaatgatacctgtcgcaccagtcttttccaaattacgcaaatatgattctagaccttcaatattctcatcatgtgcaataatatttgtcgtaacataaattttggcaccgtaacggttcgcaaattcaacaccttcagctatttcttccatcgtgaaattatcagcatttgaacgtaatccatattcttgaccacctaaaaatacggcatcagcgccataatgtactgctatttttaacttttctaagtttccagcaggtgctaataattctggtttcttcataactgttttaggagttgatttaatctcttctattgtcttcatgattaacctccttaatatactgtttgtttatataagaaaccttcgtcaaatggtcgatgatcaggttgaatttcttcaattgggtccatcaacataaatttctcatcttcatagatttcaggatcttcattgtacaaatctatcgcttgacgatactgttccgttaccacattaatatattcttccgtttgtagaataccatcgattttaaatgaatctatacccgcctcaaaaaatggtgctaattcttcaattaaacaaatgtcgtttggtgacataatgtgcgtaccattgtaatcttcgtaaactgggtaattattttgtctttcttcatcataaagcaataaagattgttcatcattgcgacgttcaattttcatttgacgatcttggaacgtataataattgcctagtagcatacgctttgattggaacatacaagtcattccttgaacttgcacctcaatttccacatttgaattttcttttatattaataatttcatccaaattcagctcacgtgctaagacagctcttgatgcgcctcttttaccccagtaattacattgaaaatgattagttactaacgtctctgcattccaatgaagtggtattggattttcttgcgccttcacatacattactactgctggatccccgaaaataattctgtcaactcgtatttcatgtaaaaaattaatataatcttctacagcatctaaatgataattatgaaataatccattcaccgccgcatatacttttttatcgtttttgtgagctaatgcgacagcctctgtcatttgttgtctattgaattcccctggaagtcttaaaccaaacttttgctcgccaattacaaaagcatctgcacctaaatcaataagtgtttccatatggcttaatgacttgggtgtgacaagtaattctgtcatagtcattctcctttaattgaaatcgctaatccatcgtctatatttaaaaaattcgttgtatatcctggttgctttattaaccactcattataatcttgaacctttttaaccatttgtcttacatttctcgatctaacaatcccaatatccgatacaaaaccgtgatataaaacattatctgtaattacgagaccttggtgctttaaaagtggtgtatatatttcaaaaaatttctttgattgcgcttttgctgcatcaataaatatcatatcataaactttgtcatttacattttcaaattgctctaaagcattaccttcaataattcgaacctggttttcaaaatgatgagtagctaaattttgtttagcatattgaatcatcgtttcattacgctctatcgttgtgacatgaatgtcatcagatatagaagcgaattgcatagaactatagccgattgctgtaccaatttctaaaatatttttaacattattcatacgaattaattgcttaattaaatctaatgttaaacgatccacgattggcacttcatttacttcggcaaattcacgcaaaacttcgattgaactattttgatgttgatgtaaatctattaaatattttttatttaggtcatccatgttttaaacttcctttatgtaaaataagtcaatatgattatgacaataaaataaatcagccttcacaattgattataattttgccaaccaattaaatgactgatttcgtgttagacgcaaagctattttatttatagaagcgaatcattcatataaaatttaactttagatattttaccatattttcaataaaattataagcgttaattatttatacattgtttgacttaaaaaaatactcttgcctccccatcttaaggttagcaagagtaaaatctttttaattattcttccatttcagtatttacaacttcttcaatcatgtcccattcttcatcagtttcgattggtactaacttaccaccgtcacctgactcatctggttcattgatcattggtacaagctcaatcatatcgtcttcatctgattgagcaccttcttcagctaagataacatactcttttttgaattcaggatgataaaattctaaaacttttcggtataaaacttcatttccctcttcatcgaataaagttaataattcttcttcgttattaatttctagttgtgaatcatgattatgttcagtcatagtaaaatctccttttaatgtagtgaatctaaatagccttgtaaaataaataccgctgccattttatcaatcacttgttttcttttttgtcttgaaacatctgcttctaataatgatcgttcagcagccattgtgcttaatctttcatcccacatcacaatctcaatagaaggataagcttctaataatttttctttatatgttaacgaagcttcgcctcgaaatcctattgaattattcatgtttttaggtagtcctattacgactgtacccacattatgttttttaataatgtctactaattggtcaatacctaattcattattttcttcattgattcggagtgtgtctaatccttgtgccgtccaacccattatatcactaattgcaattcctaccgttctactaccgacatcgagtcctaaaattttatgttgtaacataaattatttattttgctcttttaaatagtaagaaacaagctcttccataataacatctctatcaatatgacgaatttgatttcttgcttcattttggcgtggaatatacgcagggtcacctgataataaataacctacaatttggtttacggcattatatcctcgttcatctaatgttcgataaacattatttaaaacatctcttacatcttgtgttggaagttcttcatagtcgaatttcattgttttatcaaagttttccatttgcgacactcctttaattacaaatataactcactatcatcatacaatattatggctttaaattatagatttttaatgtaatctttaataaagcttaatgattttgagatattttcaggttgtgtaccgccaccttgagccatatctggacgaccgccacctttaccaccaacgattggtgccatttgtttgataagatcaccggctttaacattatttgttaaagatttagggacagttgcaaccatcgatactttatcatcaacattacttgcaagaatgataattgtatcttgtagtttagatttaaaatcgtccattgtcgagcgaattgctttcgcatttggtacatccacttcagtaaccaatactttatagccattgatttcttcaacttgatcttcaatattacccattttaagtgatgtgatttctttgtcacgttgctctaattgttttaataatgctttttcttcatcttgcaattgtgttaacttatcgactacttgattatcagatttcactttcagctgtgatttcatcgtattaaatttctcttgaatatcttctaaatataagaaagctgctttacctgttaatgcttcaatacgacgcacaccagctcctgtacctgactcacttactattttgaataagccaatttcagaagtattgcggacatgaataccaccacataattcaattgaaaatggtgccatatttactacacgcacaacatcaccatatttttcaccgaataatgccattgcgcccatttctttagctgaaacaatatccatttcttgaatgttaacgtcaatacctttccaaatttcttcatttactaagcgttcaacttgatcaatttcatcattagtcattggaccaaaatgagagaaatcaaaacgtaaacgatctgcttctactaatgaaccagcttggttaacatgatcacccagtactgatttcaacgctgcatgtaataaatgtgttgcactatggttcttttgaatgtcacgtcgatcattttggttcacttcagcagacactgtagcgccaacatttacttggccaaattgtactactcctttatgcaagttttgaccatttggcgctttggttacttcactaacagcaatttcaaaattgtcattatatacaatacctgtatccgcaacttgtccaccactgactgcataaaatggtgtttccgttaacatgaagtatactgtttcacccgcttcaacttgtgaaacttcttcaccattatatatcaagtgtgttagtgtcgtttgagctgtcgcagtatcataaccaacaaaagtacttgcagatgtaatatttttcaatacttcactttgaacttgcattgattgagaattttgacgtgcttgacgtgcacgatcacgttgttgttgcatttctgactcgaatgttgtcatatcaactttcaatcctgcttgcactgctatttcttcagttaattcaattgggaacccgtacgtatcatacaatttaaatgcatctttcccattaatttcatttgttgtcgctttagcttttttaattaattcatttaaaatcgctaaaccatcttctaatgtttcatggaatcgttcttcttcagactttataacacgcttaatgaaatctgctttttccttaacatttggataatatggttccataatgtctgcaacaatatcaacaagtttgtacataaatggctcattgattcctaacgtttgactaaaacgaacggcacgacgtaacaatcgacgtaatacatatcctctaccttcattggcaggtaatgcaccatcagaaattgcaaatgcaatcgtacgaatgtggtcagcaattactttaaatgccacatcttgttcgttgtttactaaatattgtttacctgatactttttcgatttcattcattataggcataaataaatctgtttcatagttagtacgtacattttgagaaactgaggccatacgctcaagccccatgccggtatcaatgtttttattaggtaatggtgtgtaactatgatctttattatgattgaattcactaaatactaagttccatacttcaagatagcgttcattttctccacctggatacatttcttctgccggatcgtcttgtccatatgcttctccgcgatcatagaaaatctcagtgttcggtcctgaaggtccttcaccaatatcccagaagttaccttcaatgcgaataatacgactttcttcaagcccaatatctttatgccaaatgttgtatgcttccatatcttccggatgaatcgtaacgtacaatttatctggctccatacccatccatttatcactcgttaaaaattcccaagcaaattcaatcgcttcttgtttaaagtaatcaccaattgagaagttacctaacatttcaaagaatgtatggtgacgcgctgtgaaaccaacattttcaatatcatttgtacgaatagctttttgagagtttacaattcttggctttttaggtgtttcacgtccatcaaaatatttctttaatgttgctacacctgaattaatccataataatgtatcatcatcaattggcactaatggtgcagaaggttcaaccatatgtcctttttcaacaaagaaatctagatatttttgtctaatttcactcgcttttaactttttcatcatttacacatcctatttactgtttttaaattaccattccataaaaattgatgacacagatagtcgatttgaaaaactagtataaatcaatatcactttttattattaaaaaataaaaaacgcccatcctcaaaagggacgaacgttatcgcggtaccaccctagttataaatgcaattcaatacatttatcactttaaatcgactatacagttgtgcataaagtagcgttcactaatgtttgttgtacttttcaccaaccagtacatctctgataaacaaatcattaactactcatctttatacgaatttaattctattttagttacatttacgcttgttgtcaacgttctataaagtcatacggcgtgatttctcccatattaatcattgggtcaattttaaacattgtagcttccgttaatacatttgtatctgtttttgttgaatcagacgtaacttcttcactagcattcgatgacattggcgcttctacttgatcatctattgtcgtttgcgaagctcctgtatcattagttgctgtattttccagcatgtcttcatcttctgaattaaaataatttttcaacaatgtacataattgtgttaaacgcgcttgaccatttgttttcaatccaatatcaaatgcttctgaatcaccaagtaaaactaaactggttttcgctctagttaaaccagtatataatatcggtctttgtaacattctaaaatactgtttaacaataggcatgataacaataggaaattctgaaccttgtgatttatggattgatgtacaatatgcatgtgttaattccatcatatcttgtttcgtaaatgtaatttcattaccttcaaaatccacaacaagcacatctttattaagggcattttctttcgcccaaaaaataccaacaataactcctatgtcaccattgaatatgttatcatttggcctattaacaagttgtaatactttgtcaccttttctaaagactacatcaccaaactcaatttctcgtgtgtctttctttttagggtttaaaatatcttgtaaaacttgatttaaacgtttaataccggcatttcctttatacattggtgcaagcacttgaatatcagccatagtataccctttattaacagcactagtaactaccttctcaacaactgttggtatttggtttgcctgacagttaataaaacttctatcatgaaaacgctgtgtaatatcaattttctgacccaacttcattcgatgtgctaattctataatgcttgaaccatcttgttgacgatatacttcagtcagattaactcgtggtatagctttcgattcaattaaatctttaaatacttgaccaggacctacagaaggcaattggtcctcatcacctacaaatatcaattgtgcatctaaaggaactgcacttaaaaattggtggaacaaccaagtatctaccatagacatctcatcaatgattatgagtcgtgcgttaatttcattttctaatatatcctctggctttgtgtcttgattccaacctattaaacgatgaatcgtcatagcttctaatccagttgactcttgtagtctcttggacgctcttcctgttggcgctgctaatacaactggataatcatcattgacataatcatcataatctaatgataagccatgaatctcagcatataattctacaatgcctttaattactgtcgtctttcctgttcccggtccaccggttaatagcatcaccttagaattgatagccgtttgcaaagcttctttttgtgaagctgcatagttcacttgattcgcatcctctatttcgccaatatgcatttgtaaatctgactgttcaatttccgtaagtttatttgtatgcgtctttattctgaataagttttgaacacttttgatttcagaataatacaaacttggaattgcaacttgttcattgtcaataattagtcgtttttcctcatttaagtattgcaacatttcgtctaatttttcaggttcgatgacctcttcatcttgataatttaagacatcaaccgttaaatctataacaacattgataggcaaatatgtatgtccctgtttaatacattcttcttctaacgtatagagcaacgcagcttttaatcgttcattatcgttataagcgataccaatatttctagcaagttgatctgctttattaaaaccaatacctttaatatcataaatcaattgatatggatttcgatctaaaatagtcagtgtatcaccgagataaaactgataaattgccattgaaagtttaggaccaaaccctaaatcatgtaaacgaatcattattttttcagattcttgatttgctgaaatttgttctgcaatttgtttctgtttctttttagataatcccgaaactttttctagaactgaatggtcatctaatatatcgtttatcgcattgtcacctaatgtattaacaatattttgagctgtctttttacctacacctttaaacaaatcacttgataaataacttataattgcttctttcgtttgtggcatttctttttcaaaagtctctgcttttaattgtttaccataacgtggatgatcaacaacttgccctttaaatgtgtagacatcgccttcaacaatattcggaagaaaccctacaacagttggcattgtatcaaagtcttcatttgtttcaatagtatctactttaagcactgtataaaaattatcactgttttgaaacaatatcgcttcaacagtacctttgatcattgaataatcaaatagtgtagggtctgacatgttactcctcctctttcattttagtgaatgttttcagcgcatgctgacttaataagtgtttagggtcgatagtcacagcttctttaaaatgagttatggcttcatcaatattctcatttttcataaataacgctaaacccaaattgtatcttgcatcaacatgatttttatcaatcgttaatacatgtttaagttgagttatggcttcattaaacatctctaattgacataatacaagaccatattgaaattgaacttctgcatctttgtctttatctagttctgcagcagtcattaaatacggcaatgccagcttaaatgattctaactgattaaacgccataccgatcatataattacaatcaacttgttcaatctctgtttgtaatgcttgttgatataatttaatagattcttgataacgttgctgattataatatacatttgctagattataaaatacgacgccattcttcggatctattgttaaagctttttggaaaaaacgctctgccttttcaatctcattcgcatcagcaagtactatgccggcattaatataattttcaataattgtaggatcttcttcgatatttccgaacaatgcttgtaacgcttcttctatttttccattttgtatgtattgatatattgtttgttgatctatcatttacgaacctcatttctcatcaattataacatcttgataaattgtatgtctcgaatcacttaacaacgaataaaatataatctaatatcatcttcattcatgaaaaagcgggaatggaatggaaatgctaaagaaccattaacggtttattatgtaatggttcttccacattagccaccactattatgtacttaaaataggaatacataattagactcatgcataggggtgagacagaaatgatatttttacaaaattaatttgttatccccaactctcattgcctgtagaatttctttacgaaattctctgtgttgggccccgccaacttccattgcctattaaaattctttacgaaattctctatgttggggccccgccaacttgcacattattgaaatctgattttccgtcagcttttatgttgggggcccgtccccaacttccattgcctgttaaaattctttacgaaattctctgtgttgggccccgccaactcgcacattattgaaatctgactttccgtcagcttctgtgttgggggcccgccaatataacattgtagagcctaggacattgtgatgtcccagactctatcatcatgaattattctcatcaaaaactgtctttcgtcatttccaacgctgaaacttcaaataagtaatttattgttgtcattgcttaaacaacataatttaattgaccttcatttttgaacacatcgtcaattgttgctccaccaagacacacatcaccttgataaaaaacaactgcttgtccaggtgtgattgctcttactggctcagcaaaagtaacacgtagtgcatggtcgttttcacgtttcacaaaaactttcgtatctttttggcgatatctaaatttagctgtacattcaaaaccttgatctaagtcattatcttctggatttacaaatgaatagtctgaagcaattaagtagtcactgtataatgcatcgtgatggaatccttgttctacatataaaacattatcttttaggtttttaccgacaacaaaccaaggatcgccatctccacctatacctaaaccatgtctttgtcctattgtgtaatacatcaacccactatgtttacccattttcttaccatcaagtgtaatcatatcacccggttgcgcaggtaaatattgagataaaaatgttttaaagtttttttcgccgataaaacaaatgcctgtagaatcttttttcttagcagtaacaagtccttgttcttcagcaattcgacgcacttcactcttttcgatgtcgccaattgggaacatcacttttgaaagttgttgttgagataattgattcaagaagtatgtttgatctttattattatctacaccacgtaacatttcaacatgaccatcttcatgacgatgtatgcgtgcgtaatgtcctgttgctacataatctgcacctaaattcatcgcatgatctaaaaaggctttaaacttaatttctttattacacataacgtctgggtttggagtacgaccttttttatattcatctaagaaatacgtaaagactttatcccaatattctttttcaaaattaacagcgtaatatggaatgccaatttgattacacacttcaataacatcgttgtaatcttcagttgcagtacatacgccattttcgtcagtgtcatcccagtttttcataaatatgccaatgacatcataaccttgttcttttaagacgtgggctgttacagaactatctacaccgcctgacataccaacgacaacacgtatatctttatttgacaattatgactcctccttaaatttaaaatatattttatgaatttcagctacaattgcattaatttcattttcagtagtcaattcgttaaaactaaatcgaatcgaatgatttgatcgctcttcatcttcgaacattgcatctaaaacatgcgacggttgtgtagagcctgctgtacatgcagatccagacgacacatagatttgtgccatatccaacaatgttaacatcgtttcaacttcaacaaacggaaaatatagatttacaatatggcctgtagcatccgtcattgaaccatttaattcaaatggaatcgctctttcttgtaatttaactaaaaattgttcttttaaattcattaaatgaatattgttatcgtctcgattcttttctgctaattgtaatgctttagccatcccaacaatttgtgcaagattttcagtgcctgcacggcgtttcaattcttgttcaccgccaagttgaggataatctaatgtgacatggtctttaactaataatgcaccgacaccttttggtccgccaaacttatgagcagtaatactcattgcgtcgatctcaaattcgtcaaacttaacatcaagatgtccaattgcttgaaccgcatcaacatggaaatatgcatttgtctcagcaataatatcttgaatatcataaatttgttgcactgtgccaacttcattatttacaaacataatagatactaaaatcgtcttatctgtaattgtttcttcaagttgatctaaatcaatagcacctgtatcatcaacatctagatatgttacatcaaaaccttctcgctctaattgttcaaaaacatgtaacacagaatgatgttcaatcttcgatgtgataatgtgattacccaattgttcatttgcttttactatgcctttaattgccgtattattcgattctgttgcgccactcgtaaatataatttcatgtgtatctgcaccaagtaattgtgcaatttgacgtcttgactcatctaaatatttacgcgcatctcttcccttagcatgtattgatgatggattaccataatgcgaattgtaaatcgtcatcatcgcatctactacttcaggttttactggtgtggtcgcagcataatctgcataaatttccatgtttggacactcctcacaattttatcaatgttccaataatagcaccttacatactatttttctacttttctgtttaactttatttataatgtttttaattatattttaccattttctacacatgcttttcgataggctttttaagtttatcgctttattcttgtcttttttataaattttagtatttgaagatattttatcatttgtaaaatgtaacgtactattattttggttatgagcaatttaatatttatctggttattcgattggtatacttcttatatcaaaaaaaggaaggacgatataaaaatggcgattaaatattcagcattaaaccttgtccctattcgagaaggtgaagatgaacgaacagcaattaatgatatggttaagctcgcacaacatttagacgaattatcatatgaaagatattggattgctgaacaccataacgctcccaacctagtaagttcagcaactgctttattaattcaacatacgttagaacatacgaaacacatacgtgtaggttctggaggaatcatgttacctaaccatgctccattaatcgttgcggaacaatttggcacgatggcaacattatttccaaatcgtgtcgatttaggattaggacgtgcacctggaacagatatgatgaccgcaagtgcattaagacgagatcaacatgatggtgtttataaatttccggaagaagtttcattattacaacaatatttcggccccgctcaccaacaagcatatgttcgtgcttatccagcagtaggtaaaaatgtgcctttatatattcttggttcttcaacagattctgcacatttagctgctcgcaaagggcttccatatgtgttcgctggacattttgcacctcaacaaatgaaagaagctatcgaaatctacaaaacgttatttgaaccttctgatgtattagacgaaccttatgttattgtatgtttaaatacaatcgttgctgaaaatgatgacgaagcacaatatttagcttcatctatggcacaagtaatggttagtatcactcgtggcagaatgcagcccgttcaaccgccaacacatgaactgcaaaatatattaacgccgagagaatatgcgatggctatggaaagacagaaaatatcattaataggttcagaaaatactgttcaacaaaaaattcaagattttatggaaacttatggtgaagtcaacgaaattatggctataagttatatttatgataaagatatgcaattagactcttatcgtcgattcaaaaatgttataaatcagttaaatgaaaaaaacactttataatgtgataaataaactaagtgaaagtatgtatccataatattaataaaaataaacagtaacagcattttgaataaaagttgtctttattgttcaattatttattttagtaatgattcaaattcacttaaaattctaatgcaaatattaaagcgccccttcaattttacactgtgtaagtgtttatttgatggggcgctttcaaaatattgaaaatcatatccaaaatttaaagaaatttatttctctttatcttcattttcttttttctcttcgttattagatcctgtatattcatttatcttatcttttacatttttaacttgttcattatcgctatttttaaatttttctactgcgtctttagctttatctataaaactcatattaatcgctcctcttatatttgattagtttaattgaacttattttttaagtttatcaattgcatcagttattttgtttttagcattttcaacaacttcttttgctttaccagtcgctttatcttgctgaccttctttttctaattctttgttatcagtaacgttacctactgtttctttaacattgcctttaaattgatcgaacttactttcgtctgccatagtgaaacctccttagatgtatatatttatataccacaaaggaggttcgctaaacattataatatgaagtttttatgttatagtatagtatttatacggttaaatataaaacatgtatccgtctaaatcttcacttgtatctacatattccgctaaatatttcaatgttgtattatctaaaacatctctcactgcatctctcatgcgaatccatagttgtttttgcgcaggtggttctgattcaatactttcaacaaatgtaattggaccttctaacagtcttataatatcccctgctgagatttcttccgctggcactcttaattggtatccacctttagcaccgcgtacacttcgaattaaccccgcatttcttaaaggacctacaagctgttctaaatataaatcactcaaattattttcttcagcaattgactttaatgatatacatccttgcccctcttttttagcaagagaaatcatcaatgtaagtccatatctccctttagtagaaattttcattgtataacctcacttaattcgaatattgatattcccattttagcattttttgagttaagatagtataagaaaggtgtgacaaatgtgagtacagaaccattagcgtcgagaatgcgcccaaaaaatatagatgaaatcatttcccaacaacacttagttggaccaagaggcattatcagaagaatggttgacacaaaaaaattaacttcaatgattttttatggtccacctggtataggcaaaacaagtattgccaaagcaatttcgggcagtacgcaatataaattcagacaattgaatgctgtaactaacactaaaaaagatatgcaacttgttgttgaagaagctaaaatgtctggtcaagttatcttgttattagatgaaatccatcgactagataaagccaaacaagattttttattacctcatttagaaaatggcaaaatcgtcttgatcggtgctacaacttcaaatccttatcatgctatcaatccagcgattcgttcaagagcgcaaattttcgagttatatcctttaaatgacgaagatgtgcgccaagcgttaactcgtgcaatagaagatgaagagaatggtttgaaaacatatcaacccaaaattgatgaagatgccatgacctacttttctacacaaagtcaaggtgatgttcgtagtgcgttaaatgcattggaattagctgtattaagcgcagataatgacaaggacggttatcgacatgttacattgcaagatgctaaagactgcttacaaaaaggtgcatttgtaagtgataaggatggtgacatgcattacgatgttatgagcgctttccaaaaatctatccgtggtagcgacgtcaatgccgctttacattatttagcacgattaattgaagctggagatttacctacaatagttcgacgattacttgtaattagctatgaggatataggcttagcctcacctaatgctggtcagagaacacttgctgctattgaatcagcagaacgtctaggtttaccagaagctagaatcccactaagccaagcagtaatcgaactatgcttatcacctaagtcaaattcagcaatgagtgccattgatagtgcattgtccgatattagaaacggtcatgtgggccaaattccaaaccatttaaaagatggacattatcaaggtgctaaagatttaggccgatctattggttacaaatatccacaccaatatgttaatggctatgtttcacagcaatatttacctgataaacttaaaaacaaaatttattatgaaccaaaaacgacatctaaaagtgaacgacaactcaaagaaatatataacaatttacttaaacaaaggccataaaaataagattaaatcgattacctttgatattttagctataatcaaaacaaaactgactagtacacgaggcatattctacaatgcttgcgaactagtcagttttagttttatggtatggttacacttgccttacgttgaaaattatgactttcaattttaattattgccctttgtctttaatgcgacgaactggaatatcttttaatacgtcattcaccacataacttgcacaaattaatccaactacacttggcacaaaggcatttgaagaaggtggcatttgtccttttcgattgatagcatttttatctccaactatatcttttacatcttctcttatgacaattggactttcatctgaaaatacaactggaatccctttacgaattcctagttttttcaatttttgacgaataattttggccattggatcggtatgtgttttagagatatctgaaattgtaaaacgtgttggatctgttttatttgcagcacccatactggaaatcactttaatccctcggtcaagacactctttcattaagtgtactttgtacattattgtatcacttgcatctacaaaataatctatatcgtaattatcgaaaatttcttcatatgtctcttctgtataaaacatatgtaaaggcgtgactttacaatctggattaattaatttaatacgttcttccatcaaagaaactttactttgtcctaccgttgtagttaaagcgtgtaattgtctgtttacatttgtaatatcaacatcatctttatctattaatataatatgaccaatattcgttcttgctaatgcttccgcagcaaatgaaccaacacctccaacgccaagtatgacaacagtttgttgcttcaataaatctaaaccttgatgtccaatcgctagttcatttcttgaaaattgatgtttcattattttacctctttcactgatttatacataagtacatagtaacttaaaattttatgtttagcattattgctttgattatttttccaaaattcaacgaggaaacaattattaaacgctattaaacccaactaattctttattaaaaacttaaagaaaagcataaaaatacgcaagacaaagtcttgcgtatcgatagagtccgtattgccgtagttataatagcttgatcattcggcctgttatatacaggtgggtgccctgtttcttgttttgtacgtccttcatataaggcgtgtacgctgcaagaaaacccattgggctcccttgatcaaagagtgttaggcccaaattaaaaagcaaacttacgaacaactcagatgactatcttatgatgttatattaccacataattaaaattaatgaaattataacaaaccaaagtttattgattttttaaaatttagtgacgaattcgcaaagaaagttcttctaattgtttatcagaaacttcaccaggcgcattcgttaataaacatgtagcagatgctgttttagggaatgcaattgtatctctcaagtttgttctattagtcaataacatgactaatcggtctaatcctaatgcaataccgccatgaggtggtgcaccatatttaaatgcatctagtaagaagccgaattgttcctgtgcttgttctttagtaaatccaagaacttcgaacattttttcttgtaactcaccgtcatgaattctgattgaaccgccacctaattcataaccatttaatactatgtcataagcatttgcctcagcttcttctggcgcagtgccaagcttagcaatatcggcttcttttggagatgtaaatggatgatgtgctgcaacgtaacgtttcgcatcttcatcatattctaataatggccaatctgtcacccataagaagtttaattttgtttcatcgattaaacctaattctttagctaatttgacacgtaatgcacctaaactttgtgcaacgacatttggtttgtctgcaacaaacattactaagtcaccagcttcagcaccagttaatgtaagtaatgtttcaacattttctgcctcaaagaaacgtccaattggacctgtcaaaccatcttccacaactttaacccatgctaatcctttagcaccatagatgtttacaaattctgttaaagcatccatatctttacgtgtatattgttcagctgcacctttagcgacaattgctttaatttcaccatcattttcaacagtatctttaaatactttaaagtccatatcacgtcctaattgagaaacgtcaattaattccatttcaaaacgcgtatctggtttatcagaaccatagcgacgcatcgcttctttatatgtcatgcgtgggaaagcgccattaatttcaacgcctttaacttctttaacaacttttttaagcatttcttcacccatttgcatcacatcttcttgatctacaaaactcatttcaatatcgacttgtgtgaattcaggttgacgatctgcacgtaaatcttcgtcacggaagcattttacaatttggtagtatttgtcaaatccgctaatcatcaataattgcttaaataattgtggcgattgtggtaatgcataaaattcaccatcatggacacgagatggtactaaatagtcacgtgcaccctcaggtgttgacttcgttagtactggtgtttcgatgtcaaagaacccttcatcatccaaatattgacgaatagaacgtgtaatttgatgtctcattttaaatgtttgcgctaactcgtgacgacgtaaatctaaataacggtattttaatcgaatattttcatcaacgttaacattttcttcatttatagaaaatggtggtgtctcagatttattaatcactttaatatttgtaacttgtacttcaacttggccagttttaattttaggattaacagtttcagggtcacgcttcgtaactgtaccttgaacttctacaacatattcagaacgtactgtttcagcaattttcaatgcctcttctgaaaatgcaggattaaacacaacttgtacaattccttctctatctcttaaatcaacgaaaatcaatccacctaggtcacgacgattgttaacccatccttttaatgtaatttcttgtcctaaaaatgcttcagtaactaatccacaataagttgttctcttactcatattttaacgccctctctacttcttaaaatattcgactaatgcgtctaattcaattgtttcagattcaccagttgtcatatttttaacatcgattttattattttctaattcttgatcaccaataacgattgtaaacttggcacctaaacggtctgcttgtttcatttgtcctttaattttacgctgtaagtagtctttatctgctttaataccattatgtctcaaatgatttaataacttcacagcatatcgatctgcttgatcacccattgtaacaatgaataaatctaagttttcttcaatatctaattcgataccttcttcttcaagtgcaagcaataatcgctctatacttagcgcaaaaccaatacctgtttcacttggaccatctagcaattctaataaaccattataacggccaccaccacaaagagttgtaatggcaccatcatagttagggttatccatcattaattcaaatgctgtatgtgtataataatccaatccacgaactaagttaggatcttcaatatatggaatacctaaatcatctaaataagcttttacttgttcataatatgccttagattcctcatttaagaaatcagtgattctaggtgcagtcttaatcgcttctttatcacggtcaactttacaatccaaaattcgcatcggatttgtatgcaaacgtgattgacaatctgaacaaaattcatgaattactggttcaaagtgtttcactaacgcttcgttatattcttttcgagacgccatatcccctacactattaataacaagctttaaatgttttaatccaaatgattgataaatatgcataaccatagctaatacttctgcatctacactaggattttcagcaccaatagcttctacaccaaattgattaaattgacgatagcgccctttttgcttacgttcatatctaaacatcggtccattgtaataaagtttaattggttggtttggattaccttgcattttatgttcaatatatgaacgcacaactgcagctgttccctcaggtcttaatgtaatacttctatcgcctttatctttaaatgtatacatttctttttgtacgacatcggttgaatcaccaacacctcttgcaaaaagatctgtactttcaaaaattggtgttcttatttctttataattgtaaaatgtcattaattcatctaattgattttcaatgtaacgccatttctttgaatcttcaggtaaaatatcctgcgtccctctaggtattttaatcattttgacatctccctcggcaaactattttatttaattacctttttaaaactaaaactatatacgaccacttaactttgcacgataaatcataattttaaaagcaaaagaaaaagcccttgcacagcctgaaactgcacaagggacgaatatccgtgttgccaccctcattggtttaaaaaacatgcctaattgtaatcatcattactttttataagcgttcatttaataaacccactcaaaacgtttaacgtacgtttaacggctttacttttcataaagcacctcttcttgtgttcaatgtatataaactactcagcataatctttcagtctatggattatattcctacacaatcttagttagattgctacctatttcatttaccatttcaagaatactaacggttttagttataaaattcaatatcaatgataactactttcacatatttttgcaagccctacgcagaaaaataaattttaaggccatcaacaattgcttgttctaaaatttgtctatgtaattgatctttaatcatcgtttcatcagttgggttactaatataacctaattctaataaaacagcaggaacttttgtttgtcttaacacttgataattttcttgtcttgaaccgcgattagaaagtagacctttcttctgaatcgtagcgtctaacgtatctgctaaagctctttgattatcatgataccaataaactgtcattccatttgcattagatgattctaaggcatcattatgtatactcaaataggcatcgcctttgatatcacgattttctagtgaaacatatgtatcgtctgttcttgtcatcttaacagttgcgccttctttttctaaagtacgctgcaattcttttgctgttttcaacgtataatctttttctaaacttttatatttagtattgcttgaagcaccctggtcactacctccatgaccaggatcaagcactattgttttaccttgcaaaggatttttctccttcgtattatccgcgacaatatctaaatttgtgtgccatccagctatccaacctttttcattactggatgtatcttcaacttcaatccatttacctactttaccaatctttttaaaatggtcacctttttcaactttgtaaatgactggatacgcagcgtttggacctgtacgtaattcagcattttcagttatcgtaatgttcccactatcttcactattgctattcagcaataaaaataaaaagatgataaataagacaaaggcaatcactactattagagtacgtttatttttaagaccctttttagataaccatgcctctatttttttcattgaattttgccgtcctgactttcataaataatagtgactggaccatcattatttatattaacattcatgtgtgttccaaattcacctgttttcacagttagaccatacgctcgtagcgcatcattaaaatactcatatatttttactgcttgatcaggatttttagaatttgagaaacctggacggttacctttttttacatctgcatagagagtaaattgtgaaactgataatatttcaccattcatttgttggatattaaagtttaatttattattgtcatcttcaaataatcttgcattagcaattttctttgcaattacatctgcatcttgctctgtagagtcctgaccgataccgactaataaacaatatccttttttgatttgattatttaatgtatcattcgtcaccgatgcttctttaactctttgtacaactactttcatattttgcacctctagttccaaactcttgttactgtataaacatcaccaagttgtttgatcttttctaccacacgataaacatcattcacgtttttcaccatgacactaatatttattattgcatttttatcaatatctgaacgacctgaaactttaattaaattgccggctgtcgagctaacagcttgtagtacctcatttaacaagccatttcggtcatacgcagttacctctaaatcaacctgatatttttgagttgcgtcttttgattttacccattcaacattaattagtcgttcagtttcgttcttaatatttgggcaatcagtgcgatgtactttaataccatgacctttggtgatataacctacaatatcatcacctggtataggattacaacattttgacaacttgataagtacattttctaaaccttctacatagacaccactatcagtaatgatgttgtctttaataggcaatgatttcgtaacttcttgtgcttcatttaaagcacgttgcttatctaaaatacgttgtctttcagttaatttattaacaatctgtaaggatgtcacgccgccaaatcctacagctgcgaataaatcatcttcatttgcaaagttatatttttcattaacaacctgaatatttttctctgtcaaaatatcttcgactctaaatccttgctcttttatttcagcttcaaccatcattcgtcctttttcaatgttagatgaacgatcttgttttttgaagaaacttttaattttacctttggcactagacgatttaacaattttcaaccaatcacgacttggtccatatgaatgtttactagtacgtatttcaacaatatcgcctgtttgtaaaatatagtcaattggtacaattttgccattcaccttggcaccaatcatcttattacctacttcactgtgaatcgcataagcaaaatcaatcggcacagcaccatatggcaactcaataacatcactcgctggggtaaatgcatatactttgtcactctgtaagtcatattttaaggtttccataaattcttgagcgtcagacgaagtatgatccgcttcagctaactcttttaaccaatttaacttattttgataagtttgatctttttcacttacttttttaccttctttgtaagcccagtgtgctgcaacaccatgttcagcaatttcgtgcatatcaaacgttcgtatttggatttcgagcgggtctccatttggacctactactgtagtatgcaatgactgatacaaattttgtttaggcattgcaatataatctttaaaacgtcctggcatcggtttccataacgtatgcaccaacccaagtatcgcataacaatcattaatagaattgacaataacacgtatcgccaacaaatcaaaaatttgatcaaattgctttttctgcttcatcattttccgataaatactgtaaatatgtttaggtctaccatttatatcgccttcgatattcattcggtccatttcggtacgtattctatcaatagccgtttcgatatacgcttcccgttcactacgtttcttcttcattaaattgactattctaaaatattgtacattatcaatataacgaagagccgtatcttctagttcccatttgattgtattaataccaagacgatgtgctaaaggtgcataaatttctaatgtttctcgagaaattctaatttgtttttcgcgcggcatggctttcaaggtacgcatattatgtaatctgtctgctaatttcaccaaaattacgcgtacatctttggcaatcgcaataaataacttgcgatgattttcagcttgttgttcttcttttgatcggtattttacttttttaagcttcgtcacaccatcaacaattcgagcaacttcttcattgaacatttcttttacatcttcaaatgtatacggtgtatcttcaattacatcatgcaaaaaacctgcgacaatcgtcggtccgtctaatcgcatttctgttaaaatacctgcaacttgtataggatgcataatgtatggtaatccgttttttcggaactgacctttatgtgcttcataagcaatatgatagctttttaaaacatactcatattcatctgctgacaaatatgattttgctttgtgaagaacttcgtctgcactatatggatattcgttgttcattatatgatacaccccattcatatttattacttcgccttaaacaatgatttaggtgctcttgttgaatagtatttgtcccacaccaatcatacgtccgtcgacgataaatatttatcctgtcgtcattaatcgtaatattaattttacttgagcgagtttaatttgtatactattcctacttttaaaacttttacaaaaattcgacctaaatctactgtttcattttttaaatattagttctatgatactacaatttatgaaataaataaacgttgttattaaggtataatgctcaatcatctaacattttcagtaaataaaaaatcctaacatctcatgttaagaaaacttaaacaacttttttaattaagtcattcgttcttattcatttgatgaaggattttatttgataaaattatattattttttattcgtcgtatgagattaaactcataacatcgtaatctttaattttttcaataccatttaaatatttcaattcaattataaatgcaatacctactacgataccacctaatttttcgactaattttattgctgcttcaatcgtaccaccagtagctaataaatcatctgtaattaacacacgttgacctggtttaattgcatctttgtgcattgttaaaacatttgtaccatattctaggtcatactcataacgaatgacttcacgaggtaatttcccttcttttctaacaggtgcaaagccaatccccattgaataagctacaggacagccaatgataaagccacgcgcttcaggtcctacaacgatatcaacatctctgtcttttgcgtattctacaattttatctgttgcatagccatatgcttcaccattatccataattgtagtaatatccttgaaactaacacctggtttcggccaatcttgaacttctgatacgtattgctttaaatccattaatatttcctcctaaattgctcacgacaattgtgactttatccaattttttatttctgaaaaatcttgatataataattgcttttcaacatccatacgttgttgtcttaattgatatactttgctggaatcaatcgatcttttatcaggttgttgattgattcgaattaaaccatcttcttgtgttacaaattttaagtctaagaaaactttcaacatgaatttaagtgtatctggtttcacacttaaatgttgacacaataacataccctctttctggatatttgtttcttgtttagttattaatgctttataacactttttaaaaacatccatattaggtataccatcgaagtaaatcgaatgattatgttgcaaaactatataaagttgagaaaattgcagttgttgcagggaattagacaaatcttccattgacgtaggtaaatctcttaatactactttatcagtttgttgtttaatttcttcaccataataatattcattcgcatttactttatcacttttaggatgaataagcacgacaatattttcatcattttctgtaaaaggtaaactttttcgcttacttctataatctaatatttgctgttcgttcatcgcaatatcttgaataattaattgcggtgattgattaccattccattcgttgatttgaacagatcctaatatattaattggctgttcatcttgtaattcaggttctaagtgtccattttgccaaaatagcgcggcgatattactttcaccaagtgtcaatttcagatgatttttttgttgacctatcgccttaactgaagaaactgataaatcatccatttcaaaaataggtctagaaaaatctgttccgaagggtcttaaacgattcatatcacgaatatttttaatcgttatatcattttctgttaataatacatctactggctttacgggatctaacgaagttgttttagataattctttcatccatttatttaaaccttcagctaacgattctatattttcaatatccatcgtcatacctgcagccatatgatggccgccaaatttagcgattaactcttggtgtgctgatagtatttcaaacatcgacacttgatcaattgatctggcggaaccttttgcatgattttgctccctatcaatatttaaaattaatgttggcaaagcaaatgtttcgacaattttcgaagcaacaatacctaagacaccttcatgccaattttcttttgctaaaagtaaaaataaatctccatttttaactttcatttctgccattgccattgcttcttctgtgatagttgctacaatatcttttctttcgcggttaaattgttcaacttgttctgctaaaaatgcagcttcttcttcgtcgtcagtcatcaacaattcgcaagctaatgatgcgtcatctaaacgacctacagcattaagtctaggtccaataataaaaccaattgtttcttcatcaatattgtcattgtatcccgcttcttttagcaatgctttaacagaggtcggacattgatcatttaagacttttaatccttgtttcactaatgatcgattttcatcagttaatgatactaaatccgcaatggtacctatcgcaactaatgctttaaaataatcaggtacattttcaatcaatgcttgtgctaatttgtacgcaacacctgcaccacacaattgttggaacggataattaaacgatggatgcattggatgtacgattgcatatgcttctggtaatgtactaccaatttcatgatgatcagttacaatgacatcaactcctaaatcttgaaccattttaatttcattatgaccttgtatgccattatcaacagttatgattaatgttatgccttcatcatgagcatttctaaatgctagctcgtttggtccatatccttcggtaaagcggttaggaatatgccatcctacttgtgcacctaaaagttgtaatgttgtcactaaaattgtagttgaggtaacaccgtcggcatcgtaatcaccataaactaggattttctcatcattcgctatcgctcttttaattctttcaatagtcttagtcatatcgctcaattgcaatgcgtcatgattgatatctgtatctgaaatgatggattcaattgcttgttcatcaataatcgatttactttctaatattttttttacgattggcgttaactttaattttgatgttaattcatcacttatgtattcagctggtttagttaatttccacttatacttcggtttaatcatatatatttacgcctcatttccaaaagacattatatctaaaattactttaaataaaaagcacttatctaaataatcaagactttaattataccattttttaaaaatgaatgcgggaacttatttatatatattttgttaaatttaaacaaagtaaaaagcggtatgtgaactctttaatgtttcacataccgcttaattcattttaaactaaaatcttttcatcgttcgatttcttttctttatatacaactaatttgtgtttcggcgattttttcaactgacgttttttcattattccccaaagcggaacggcaatgaagattgaagagaatacaccagaaatcaatccgataaataatgctaaagtaaagttgaatatcgtaggagcaccgaagaatagtatagcaactactactacaataactgttaatactgtattaattgaacgtgtcattgtctgtctaattgatctattaacgatatcatcaatttgttctgttgtagtaatcactttaaccttttgtaagttttcacgtacacggtcaaacgttacgattgtatcattaattgaataaccgacaattgttaatacagcggcgataaatgttaaatctacttcaattctaaataaactgaaaatcgctactataatgaatacatcatgtaataatgccaatacagatgaaagacccatgcgccattcaaatcgtaatgatacatagatgatgatacctatcgatgcatagattaatgcaagcattgcattttttgctaattcctgtccaataattggtgatacagtgttaatttgaggtgtgtcaccgaatttcgatttaatattatcactcaatttattatcttgagcacgcgttaaatcgtctttaaattgaacagttgctactttattatctttaccattgatttgaatttgatccgctttaagtccactaccttttacaacttgctcaaccttttgttgagtaattgcttgtttagattggaaatctacacgtgtaccacttgagaaatcaattcctaggtttaacttgaagatataaagaataactaaaccgacaactacaattaaaatacttactccaattaatggcttagctaatttaacaaaattccatttctcgaatgaagttttaaggtcatgaacatctacaccttcattaatatcatgtcgtttattctttttaacaccaaataaccaatattgatttttgaatatatttgatgaaacaagtaatgataataagaatcttgataagaacacggctgtaacaaagatcattagaatacctaataataacattgtcgcgaaacctttaactgaactttcaccgaagaagaataatactgctgcggcgataactgttgttaagttagaatcaaaaattgttaggaacgaacttttgtttgctttagaaaaggcttgctttatcgttctacctattcgaagttcatccttaatacgctcatacatgataatattggcatctacagccatacctacacctaataccaacgccgctaatcctggtaaagttagaaccccggaaatgaaattaaatgctactaacgttagatagatataagttgtcaatgcaataatcgctactaaaccaggtaatcggtagaatccaagcatgaataaataaattaatgctacaccaataaacgatgcaaacacagttttatctaatgcatcttgaccaaattgggcacctactgagtttgaataaatttctttcaagtcaactggtaaagaacctgcatttaacaattcggcgatttgttttgcttttttaacgccttcttgtcctttaaatccaccagagatttctacgctatcagaattgattggttgatcaacacttgctgcagaaataaatttagggtttttcttttgtgcttcttttttatagctgtcaccttttttgaaatctaaccaaacaaccatgacattatcacgtttcttagagatttcttccgttacttttttaaatttgtttttgtcttttactttgaaagtaactgttggctggtttgtttcctgtttaaattcttgtttggcagatccctgtttaatatcagaaccgcttaattttactttatcttctgcatcgcgaattgttaaattagcttgagaagataaaattttacgtgcttcattctggtctgttacaccagcaagttgaactctaattctattaggttcttcaacttgaattttaggttcggaaacacctaaaacgttaacacgattttctaatgtttgcgctgttgattgtaaggcttttttatctattttgtcgcctttatttaaagggtcgacttgataaagcacctcaaatccaccttgcaaatcaagtcctaaattgacattctttataacacttttataagttgcagccattccggcaaacaacaatacgactaaaagcaagaacgcaattattctactacttttcttcacatgaacacctcattatttacgtatgtatttagaatacttgaatactattttataacgcaagttaaatctttcttacaaaatttattagccttatacatattaacatactagagcagggagtaaaaatagtcatagatatatttaatttaaatttaacaattattatgtatcacaatttctttttttggaataaaaataagctattctacatactacttataacttaaaaagagcttgggacattaagttcttaggcaatgtaaaaaagctgatttctattaattatttgatagaaatcagctttttttaaatgtatttgataatatacagctcgtcgagctactattttccttatattaagtgccattaatacaaaacctagctctcgtttaactttatttattcctcgaactgacattcgagtgaaacccaaaatagccttcataaatccaaaaacaggctctacatcaatttttctttgactatagatttttttcgtttctggttcagaaagcttttgattaatttgggctttaaagtattcccaattataattcttcatgattttcttattggatttcgaatttggcttcatgcattgttgcctcaaagaacatgctgaacagtcatcgcattcatatagtttgaagtcacgtttaaaaccatatctatcattacggtatgcatatcttttaaaacctattcttttgttattaggacatataaattcatcattaagttcgtcatatttccagttttgagtgttaaaaatgtcacttttaaactttctcgttttatctttaataaacataccatacgtaataagtggcgttttattaaaatcatctataatagccatatagttttgctcactaccataacctgcatcagctacaatatactccggtaaataaccgaaggtattttgaatcattgttaaaaatggaattaaagttctagtatctgtcgggttttgaaataggtcataggataaaacaaattgagaatttgtcgctatttgtaaattgtatcctggcttaagttggccatttttcatatggtcttccttcattctcataaaagttgcatcatgatcagttttagaaaagctatttctatctttaagaatcgatttttgttcttcatatttactttttctttcggaataatcatcaaatttctttttgaacttcttaatctcagttctttttttacgggtctgttttctaatttgagtacaatcttcgttctgaatagaatgatttaaatcttcgatttctttatctaaatgactaccaattaaatctatttcttctattgttaaatcgctatctccatcttcttttatctctggtattattttttcttcaactaagtcacgatataatgcttttgaattttcgttcaatttcgattcgtgattttgaatacttttcttccacacaaatgtatacctattggcattagcttctacttttgtaccatcaataaaaattgaattatcatcaataagattttgctttaaacattgactatgaaactgaataaataaagattcaattaatgcatcagtattaggatttactctaaaacgattaatagttttataagaaggtgtttgattttgagctaaccacatcattcgaatactgtcatgaagtaatttctctattctacgaccagaaaatacagattgagtgtatgcatataagataatttttaacatcatttttggatgataggatgttgcgccacgatgatgtctgaattcatcgaattcgctatcaggtatcgtttcaacaatttcattaacatatcgtgaaatatcattttgaggaattctaacagaagtttctattggtagtgtaagttgggtcatgttataatttttatacataaggcacctcgttaatttagtttagtggtatttattaaattatacgaaagtgtcttatttttttaaagtatttcaaagtaaaattacatgttaatacgtagtattaatggcgagactcctgagggagcagtgccagtcgaagaccaaggctgagacggcaccctaggaaagcgaagccattcaatacgaagtattgtataaatagagaacagcagtaagataattttcaattagaaaatatcttactgctgtttttttagggatttatgtcccagactctttttaataccacttcttgttatgaagggtcaacttgtttaatagcaggtttttcgaaagttaattcagtaccatgaccattaactgtaataacaacagttgtttcatctactgctttaacagtacctttaataccaccaatagttgtaattctttgaccagattgaatgttattaatcaactcacgatgctgtttcgcacgtttttgttgtggtctgatcatcaagaaatacataaccgcaaaaattacgactatatatataagtaatgaaaattgcattttatacgctcctcttgcttaaaagttttttgggttctcaacatttaatccatattgctcgaagaattcttctttgaaatctaaaagacgatcttctcgaatggcttgtcttatatcttccattaattttagcagaaaatgtaaattatgaatagtagtaagacgaataccaaaagtttcctctgccttgattaaatgacgtatatacgctcttgagtagttttgacatgtataacagtcacaattctcatctaacggtcttaaatcatctgcaaattttgcatttttaataactaaacgaccttgcgatgtcatacaagtaccatttctggcaatacgtgtcggtaagacacaatcaaacatatccatgccgcgaatactacattcgattaacgcatctggagatcctacacccattaaatatcttggtttatctttaggcataaactgctctgtatgttcaaccattttatacataaccggtttaggttcaccaactgacaaacctccgattgcataaccaggaaaatctaattctactaaatcctttgcactttgttctcttaaatcttcatattcgccaccttgtataatgccgaacaatgcttgatcttcaggtctttggtgtgcatctagacatcttttcgcccaacgcgttgtacgttcaatagatttttttacataatcatattcagcaggcatcggtggacattcatcaaatgccatcataatatcagaacctaaatcattttgaatttgcattgatttctcaggactcaaaaataatttagacccattagtatgatgtctaaattccacgccttcttctgtaattttacgtaaattacttaaactaaacacttggaaaccgcctgaatctgttagaatcggaccatcccaattcatgaatttatgtaatcccccagcgtgtttgataatatcatttccgggttgtaaccacaaatgatatgtgttgcccaaaatgatttttgcttcaatttgtcttaactcttctggactcattgttttaacggttgctttagtaccaactggcataaacataggtgtttcaaatgaaccgtgtggtgtgtgcacgatacctaaacgcgcacctgattgtttacaagttttaatgtgttcgtatgttactgcaggcatattcaaaatcctcacattctttttatataattaacattgcatcgccaaaactaaagaatctatattctaaatttactgccgttttataagcattcagaacattttcacgagtactaaacgctgatactagcataactaatgttgattttggtaaatgaaaattagtaatctggccatcaatagctttaaaatcaaatcctggataaataaatatattagtccagccactcgtttcaacaaatttatcatgatcgcgtcgaattgtttcaagtgtacgtgttgaagttgtaccaactgatataatgcgatgtcctttagacttagtatcatttaataaatcagctgtttcttgtgtcatttgataatattcactatgcatttcgtggtcattcacatcgtcgacgctcaccggtctaaacgtacctaatccaacatgtaatgtaacaaatgcgatattaacacctttatttttaatttcagttaataactcatcagtaaaatgtaatccagctgttggtgctgccgctgaaccactttctttagcgtaaactgtttgataacgatctggatcatctaaacgttctttgatgtatggtggcagtggcatttcccctaattcatctaatctttcttgtaaaataccttcataatgtaaacacatgatacgtccaccttgatccatttcttttatgcattcagctataattttgccattaccaaaattcaatttattaccaactttaatacgcttagctggtttcagtaagacttcccaatcattaccttcaatttgagttaacattaacatttcaacttttgcaccagtttcttcttttaaaccaaaaagtctagctggcattactcgcgtatcgttaagcactaatgtatcaccaggtctaaaatactcaatgatatctttaaaatgtaaatgtttcatttcaccagtttctctatccatgactaataaacgactatgatcacgatcttttaaaggcgtttgagcaattaatgattctggtaagtcatagtcaaattcttcaatattcacgttattctctctcctcattcgactttgcaaaatgttcataagctaatggtgttgcttttctgccacgcggcgtacgttctaaaaagcctttctgaataagaaatggctcataaacgtcctcaattgtaatacgttcttcgccaattgttacggcaatcgtatctaaaccaacaggtccaccattatactgcttaataatacagttcatcattttatgatcaatgtaatctagtccgtgttgatcaacttgaagtaaacctaatgcgtgctttgttgtttcaatgtatatttgttcatcttcattcacttgctggaagtctcttacccgtttcaatagtcgattggctactcttggagtccctctagaacgtttagcaagttcaatagcactttcttcatcaatacctgtgcctaaaacctcagctgttctaataatgatttcttttaaatctgattcattataatattctaatcttaagtgcacaccaaatcgatcccttagtggacctgttaagctaccagctcgtgttgttgcacctaccaaagtgaatggaggtaagtcgatacggatacttctagcctcatcgcctttaccaatgataatatctaaaaagaaatcttccattgcagggtatagcacttcttcaacaacactactcagtctgtgtatttcatcaataaacaaaacatctccaggttgaagccctgataaaattgcagccaaatcaccaggtctttctaatgaaggccctgatactgtacgtatattaacttccatttcattggcaatgatattagataatgttgtcttacctaatccaggggggccaaaaagcaatacatgatctaatggttcatgacgaagtttagccgctttaataaatacttctaaattactttttattgaattttgaccaatatattgtcgtaatctcgtaggtctaagcgacaattcgaaatcagtttcttcactatgcattgattgatcaaccatacgctcattcatgacaacacttcccctattaatctatttaaaattaagatacaactaattgaagacctgccttaacagcttcatcaactgagtcatatttatttttatttaacgttttctcaacttttgcaagctctcgtttagaataacctaatgcttctaacgctaacattgcttcttgcacgaattgatcttgctccgtcgatgtagcgtctacttgtaataatgaatcgctatcttcttcagtgattttcactttaccttttaaatctaagacaatctgtcttgccgttttcttaccaattcctgggaatttagttaaatacgtatcattttcattttcaatggcacgttttacttcattaggtgtacttgtcgctaaaatagctaaagctgatttcggaccaataccagtgactttaattaaactcaagaacatatctttctcttcttcactactaaatccatacaataattgtgcatcttcacgaacaattaaagatgtatgaattaaaacttcatgatctagatgcttttgaaaacgataagaatttggtgtttgaatttcataaccaacaccagcagtttcaacaactacgtgtgtaggatataaatgtgttaacttacctttgacatacgcgtacattataggcacatccttacatactcatactaattaattctacttttgatacataatctaaatttctcaaagcgccaataacatcttctactgaagtttctttagatttagcattcagtgataatgttattgttgctttttcttccattggaatactttgatgaatcgttaatacagatagttctaactttgatataacatctagtacacgtgccaacatacccacaatatcagttacatataaaattaatgtaaattctcgatggtcaagcattttatcgtctactggaaatatcgtttctctatatttataaaaagcacttctagatagatcaaactgtttaacggcatcataaatggacaatgtcggatcactttttaaggcatctttaatcttcaatgttttaaccacggattcaggcaagacatcttctctaattaaataaaactttttataatctttattgtccatcatgttacgctcctattcaacgaattcaaattctccgccaagaattctaacgatatcaccatttttacaaccacgttctctaagtgcatcatcaatacccatcgaacgcatttgacgagcaaatcgacgtactgctggatcgctgttaaagtcagtcattttaaacattctttcaatagcattaccacttaccacataagcaccatcatcatctcttgaaattgtaaatttatcttgtgacggtgtatgtttatataatactcggttaatgccaactgactcctcttcttcaactgtgaagtcaacatctttatattcttctaatttatctgctattgcatataataattgatcaatattatcacgcgttattgttgaaactggaataactggcacatcttcgccaatttcttctttaaacaagattaaattatcttgtgattcaggtaaatccatcttgttagctactacgatttgaggtctatcttctaaacgttgctcgtacgcggctaattcttgattaatgactttataatcttcaataggctctctaccttcagaaccactcatatcaatcatgtgaacaataacttttgttctctctacatgtcttaaaaattgatgtcctaatccaacgccatcagatgcaccttcaattaaacctggtaaatctgccataacaaaacttcgttgatcaggtgttgaaacaactcctagatttggtttaatcgttgtaaaatgatatgcccctattttaggcttagcttttgaaacgatagataataaagtcgatttacccacactagggaaacctactaatcctacatcagctaataatttcaattctaaagatacatctaattcctcacctggttcacctttttcactgaagtcaggtgcagggtttctaggtgttgcaaaacgtgaattacctcggccacctcgaccgcccttcgctactacagctctttgaccatcttcaacaagatctgctaacacttcatctgtttcaacatttttaataattgtgccaggtggaacttttaatactaaatcttccgcatttttaccatgcatattactactttggccattttcacctttgcttgctttaaaatgacgttgatacctaaaatctaataacgttcttaaaccttcatccacttcaaatacgactgaagcacctttaccaccgtcaccgccagctggtccaccaaatggtacatatttttctcttctgtatgcggtaataccattaccaccatcaccggctttaagagatattttgacttgatcgacaaacatatatctcacctcttttacatataattttcattttcccaataattatagcatattagagccccttatatattgtaaataattaggggctcttatgcagttgcttttataaatctttgctttaaaatacttatatttctcaacaccaattgtggtacagtttattctttaaacgctgcaactgtaatccttttagccccttatatattgtaaataattaggggctcttatgcagttgcttttaagtttactttactcaaattgctgatatttccgagtaccaaattcgatactttttgctttttatactgcaactgtattcctttgtccccttatagtttagcgattaggggctcttatgcagttgcacatttagtataatgtctataattcccattttttaataacaaaatgaaaataataatgaaaaacgttttataaaaagtaaaaaacaccagaagattcacttctggtgttaactagacaaaattattcagctactgcatatacagaaacttgttttttgtcgcgacctttacgttcgaatttaacaacgccgtcgattttagcgaataatgtatcatcgccaccacgacctacattttcaccagggtaaattttagtaccacgttggcgatataaaattgaaccacctgttacgaattgaccgtcagcacgtttagcacctaagcgttttgattcagagtcacgtccgttttttgtagaacttaccccttttttagatgcgaagaattgtaagtttaattttaacatcggaatgcacctcacttataatttaatctaatattctcattatattcttcttcaatagtttgtaaagacacaagcattgtttgaagaattagttgcgcttcatcgttatttgtatcaacgcttcttatatgaaaatgaccaccattgtcgtcataattgatatctggtctctcagatgtcaatcctataatcgcattaacactaccaaacaatacagctgaagctccagcacaaacgatatcatgaccatattcaccatggtcagcatggccatccataataacgtctgttactttgccttcatcattaactgtaatatcaacagtaatcataataattacgcgttgattttatcgattgttaatttagtgtatggttgacgatggccttttttacgttttgaatttttacgacgtttgtatgtgaatacagtgattttttttaccgcgaccttgtttattaacagtagcagtaactgttgcaccttcaactgttggcgctccaactttaactgaatctccacctacaaataatactttatcaaatgtaaaagtatctccttcgtttacgtctaatttttcaacgaagatttcttgaccttcttctactttgatttgttttccacctgtttcaataatagcaaacatactttgcacctcctgtataataagtcacgccatacataggtgacatttcgttattgagtcaagcgtttgcactctacgttgtttcggtcgcaactcgagtcatttataaagataaactcttctcgtttcttccttcaacgccttgattgacaatcgctttctttcaataacttctgcaaatgagtcaagcgtttgcactctgtgggaaaatcgctttcttcattaaaaatgttcttgaacctatatttgagcggttgtatgtagctacttataactactcaactattgcatcttaccattgacggcgtttcatgtcaatgtcattgtttgtttttttaaggaactttataatcaacggataaagcatgatcaacagtacaaaattcataattaatgttggcaataatctaaagactacaaaatgaataatatcaaattgaatgaatcctaacataccgtatattaatgccacatagacttctaataataaggtgctagctaatataataatgaataacatcgaatgatctttgtaaaaaattttaaagaatcgatctataagtgctaaaaacaatatatagccaaataagtacactccataaatactaccaaagtatacatcagtcattacacctaaaaatatgctgagcaataatgatacgccaaagctacgatacactaccatcattaaaatatacataaatgtaaggtgtggtacaaatacaagttcaaacttacctatgtgcattggtataagaagcccaattgcagtatctatataaaatagtaaaatacctatcaaaaaataatacagtgtacgcattatttatccctgctttcatcatcaggaattgttttaggatctctttttgcaacataaacatggctcaaatctgttaagtctgcaccagtcttaaccctaacttctttagctaagccgtattgatcattttgaaccttagtcacttctcctatatataaattacttggtagttgatcagctaatccacttgtaacgactttatcaccttttgagatattatctctattattaatatcactaattacaagttctgagttcttttcatcataacgatcaattaagccaaatatatttttagaaccgtgttgtatatttacagataatttacccgcacgtgtattagttgagattaaatcaacttgtgaagaaaatttattaactttagtaactcttccaacaaaaccttgtgatgtcatcacagccatatttgaagttatacctgatttagatcccttatcaattacaattgtattcatccactgatccggatttcttgctaaaaccgtagtagaaataggatcaaattttgaaatatcttttaaatcaagctctttttttaatttttcattttccgcttctaattgttggttcttagattctaactggctaatcttatttttagattctttagaatctccttttttaaaaaagtccccaatcgtaccagcaacaaaattaactggataactcacaactcgttgtccaaaagacacagaatcacctatatattgttcaggaggtgattgagattgtgaacgtatggacagcccaattaatgcaataaaaacgataattgcacataaaacaacaattaatttgttatttttaaaaaacttaagcacccagaacacctctattatgtcaaaatattgtatatccttttctattttatattactcccattatgaaataaagcactaactacgaattactttgaaaatgaacaactccgtaaaaaaatttgtggcattttaaaaacaaaaaactactagcaaacattccagtcactagtagtttaaataatcgatttaaattttaaaattatctgtttgtatcgttcgaggattcactgttcgaattctgaagttgtctccaacgtgcgaataagttctgggccttttgttgttcattagcttgtttctgttttgattgttctgccatttgaactacaccaaccttttaaatttattctagtgacaggataactaaaatatatttcttatgcaataatttcctattgataagcattttcgggttttagttgtaaattttgccctaattcatttaagtcttgttgcatttcaaattcagtattgtaaacacgcattgactcatctccaaatttataaagaataaattcgtctcctctttgacctataatatattgatcattataagccatgcgattcattccagacacagccataaactctagtttatctatcattttaaatacatttttaatttggcttaatggtacattttttattaaatcattttcttttaatgaatatttctcaccacttacataaacatgttgggcatcattagtgggttgcgtaacttgattcatttgatcattatcgtgatttacaggattccaatcttgttcttttaaaaaaggtgcgtatttcaaggcgatataaacaattatcacaattgctattactgctataatgtttttaatcatactaaatatcaatctcatagttcgcctccaatgtcttcatctaattatatattttattatgtatattttcctcagtcttcagccttaatcatgatatatcttaggactgatgcacgttcatttaaaatggcttataattttgttatgatttaaaagcgtatgaggaggtttgtagcattgagtatactcacaattattttaatagcactattagtcatcctcctttttagagttggactttctattttgcgatttttaatttatgtcggacttgttttattatgtatttacttaggatatcaaggcttaatatggttgctcgatttttttcaaataaatagtggatttttaccacactttcaatttaacaattaaatctattctgcataacaaaactcctaatgtactagtttagaattttttaactagttccacattaggagtttaatttgttttcaagcacgtatactacttgatgaacagattactattatttacgcccaaatgcgttagataaaaatcgtatcagcgcgtagctaccacttagtaataggccccaaacgattccagtaataattgagcctattgctacacttaataaaggaaaagcttgtttcgtaacaatcacacctgctaatgccgttactaaaatacctaacgtagataaagctaatgttattaatagattgcgctttgttacaggttcatttttaatatttaactgcatggtataaaccattggcacgagaaccccgataataataaatagagtcactatttttcctccaatgaaagtacttcgtaggtattatacacaagatacgtcattaattctatcaacttcaatcattttcatcaaagtaacccgcttctacaagactggtaaatctattatcaccgattataatatgatccaataaatctattcctaaaatcaaaccacactccttcaacctcattgttgttattatatcttcttgtgagggcgttacatcaccggatggatgattatgaactgcgatgattgcattggcattttctctcaccgcaatactaaaaatttcacgtggatgtacaatcgaactatttaatgtacctttaaaaacacaggtttctttaatcactacattttttgaatttaacaataaaatgacaaaatgttcttgtgttaaatctttcattgttggaatcatataatcagcaacatcacttggttgcgttatttttatacgattattttcagctcttctccccatcctttcccctaactcaaatgccgcttttaatgtaattgctttttgtaatccaatccctttaacttgtatcaaatcgttaattgaagattttttcaattcattcagattcgatgcagatttaagcagttcattactaatgtcaatactcgagaatccttttcttccggtgttaattaatatagctaataattctgtattcgaaagactttttgcaccatggcttaacaaacgttctcttggcatttctgaagttaccatttctttaattttcaaaaatatacgcctcctaaaaattgatggatatcattataaaaaagtgaattgataaaaaaggaaataaatataaatggaacaaggggtaatagtttaatcggcttaaatatcatggtaattaaagcaactaaaccagcaatgacaaatgtaaatataatgacataaatagtgaattggagagggaaaaacaaagaaagtgcagatattagtaaaacgtcaccataaccaatatatgaccgaaataaaaagtagaatatatgcgtggtcatactaataatgataaaagctactggataagtaatacttaacgagagagaaacaatacaataaattataattaagcgacaatctaacattaaagaagtgatatcggtcatagtaaaaataagcagaaaaacatatgtagttataaaaagcgtagcatttacgtatgtgaaatcatacttaataaagacgataggtattaaagcaaaggtttccccaaagaaatgtgttagcgaaatacgcttatgacagtttcgacatctcccttttaataataaaaaactaataatcggcattaattcataccatttgagtgatgaattacaataatcacatttcgatcttctatgtaaataatcaaatgacgtttcttcaatagatataaattgatatagaaaactaaaaatacaactgcaactataagataacaatactaccaaatgacaacctccttacgtaaattatagttacttattaccaaaatgtaaatatacactattctccaaatattgaacctctttttcatttaaatttttcaatattactaagcataattgatggatactttaacagcccattactgctcggcaaatttaataatggcaagaaattaaccttataaacacatacgatttagagcataaaaaataaccatgaagctacctattgattaaatagattcttcatggctattttagttttataatgcttcaaagtctaattttgatttaacttcacttatgaagtacagactaccggtaattactaatgtatcaccttgataattttttataaattctacgtagtcatctactaattgtatatcgtcattttcaatgctacctacaatttcttctttgcgtaacgctttcggaaaatcaaattcagttgcataaaatgtatgcgcaattaaacttaaatgtttgaccatctcgttaatcggttttccgtttattgctgagaacaaaatatctactttttctttatcatggtactgtttaattgtatcaattagagcatctatactctctgaattatgtgcgccatccaaaatgattaaaggtttgtcatgcacctgctcaatacgtccagtccaacgaactgattcaataccgtctatcatcttattgaaatctaattcaattaatccttgttcatttaattcaataagagctgttatggctaatgcagcattttgtttctgatgttcacctaacatacttaaaatgattgtttctaattcataatctttataacggtaagtaaattcatcattttgcgatacaacaacaatttctctatctaattcaattggctttgcatgttgttcaattgcgcgttcacgaacatactttaatgcatcttcatttttaacagcatatataactggaacgttaggctttataatcgcgcctttatccctagcaatatctagataagtaccacctaaaatatctgtatggtctagaccgatactagttaagattgataaaatcggtgtaaagacatttgtcgaatcgttctttatacccaatccagcctcaacaatgacaaaatcaacaggatgtatttcaccaaaatataaaaacatcatcgctgtgattatttcgaattcagttgcaacacctaaatctgtttcacgttccatcatttcactaactggtttaatacgtgatactaattctacaatagcgtcatttgatattggcacaccatttagactaattcgttcattaaatgtttcaataaacggcgacgtaaatgtacctacttcataaccattttcaactaaagctgttctaaggtaagcaactgtagagcctttaccattcgtgccacctacatgaatacccttaatgttattttgaggattattaaattgtgctagcatccattccatacgtttaacacctggtttgatgccaaatttagttctttcgtgtatccaatacaagctctctaggtaattcattgttactaactcctatgcttttaattgttcaattcttgccttcacaccatcatatttttcttgataatcttgttttttacgtttttcttcatttataaccttttcaggtgctttacttacaaagttttcattagagagctttttatctactctatctaattcgctttgaagtttagctaattctttttccaaacggctgatttccttatccatatcaattagcccttctaatggtaataccactttacctgcaattacaactgatgtcattgctttctcaggaatttccacgtcagtgcttatatttaacgtactaggattacagaatttgattaaataatctttgttttgtgataaagttgtttcaatttctttatctttagcttgaattaaaataggtatttctttagacaatggcgtatttacttctacacgtgattgtcttacagatttaatgatttcaacaagttgttgcattgtttgtttactttcttcaaaaatcaatgattcacgcacttctggccatgaagctttaacaattgtttcaccttcatgtggtaaactttgccatattttctctgttacaaatggcatgaatggatgtagcattctcataatattgtctaaagtataactcaatactgaacgtgtaacttgtttttgttcttcatcattaccattcattggaattttactcatttcaatgtaccaatcacagaaatcatcccaaatgaaattatataatgctcgtccaacttcgccgaattcatatttgtcacttagatcagtaactgttgcaatcgtttcatttaaacgtgttagaatccatttatctgctaatgataagttaccacttaaatcgatatcttcaactttaaagtcttcaccgatattcattaaactgaaacgtgctccattccaaattttattgataaagttccacactgactcaactttttcagttgagtatcttaaatcatgtcctggagatgaacccgttgctaagaagtaacgcaagctatcagcaccgtattcgtcaataacatccattggatccacaccattacctaatgatttactcatcttacgcccgtcttcagcgcgaactaagccgtgtaataacacatcattaaatggacgacgatctgtaaattctaagccttggaatatcatacgtgctacccagaaaaagataatgtcgtaacctgtaactaaggcatttgttgggtagtatcgtttaaagtcttcgctttctaaatcaggccaacctaacgtagagaaaggccataaagcacttgagaaccacgtatctaatacatcttcatcttgttgccaattttcaatatcagttggcgcttcttctccaacatatatttctcctgtttctttatgataccaagccggaatttgatgaccccaccataattgtcttgaaatcgtccaatctctaatattttccatccattggttaaatgtatgttcgaaacgttgcggataaaaatcaatacgatcatctgttttttggttatctaatgaacgtttcgctaagtcttccatgcgcacaaaccattgcgttgataaatatggttcaacaacagcgccagatcgttctgaatgacctacagaatgaacatgatcttcaatcttgataactaaatcttgttcttttaaatcttcaactagctgtttacgacaatcaaaacggtccataccttcgtatttaccagctttgttgttcattttaccattttcatccataacgataatattttctaattgatgtctttgaccaatttcaaaatcattagggtcatgtgctggtgtcactttcatagcaccagaaccgaagtctatatcaacatattcatctgctaaaataggcagttcgcgtcctacgattggtaatataacagttttaccgattacatctttgtatcgttcgtcattagggttaacaacaatcgctgtatcacctaacatcgtttctggtcttgtagttgcaatttcaataaaaccttcaccatcagcgtaaggatatttaaaatgataaaacgcaccttgaacatcttcatgtattacttcaatatcagataaagctgtacgtgctttaggatcccaatttataatacgttcgccacgataaataattcctttattgtataaatcaacaaaaacttttttaactgctttacttaaaccttcatctaaagtaaaacgttctctactataatctaaacctagacctaatttagcccattgcgcacgaataaatgacgcatactcttctttccaatcccatgcttgttctaaaaacttttcacgaccaagatcatatctagttattccttgttcatttaatttagcttctacctttgcctgtgtcgcaataccagcatgatccatacctggtaagtataacgtatcgtatccttgcatacgtttcatacgtgtaatgatatcttgtaaagttgtatcccatgcatgtcctaaatgtaatttaccagttacatttggtggcgggataacaattgtatatgtttcttttgatttatcttctgacggtttaaaataaccattcttcacccattcttcataacgtcccgcttcaacttcacgaggatcatattttggtttcatttccatttgctatacctcctaaaaaataaaaaatatccatcctatatacaaataggacggatattccgtggtaccacctatattcaagaaggatgattaatatcaaattcactcttttaacataattggaataatcataccaatactatcatcgtgaaatttgaaatgcttcatctcttcaagcactctagattatgattaacgctcaaacacgtcttagcctactattaatcacgttcagctaagatactctgtgggctaccttcagtaaaaatcatttacatactcacaccaaatcatatgctctctttaaaataatttgaacttactcttcccaaatcctatattaaactcttaacttatagtataatgattgacaaaataagtcaatgtataggtgggaataaaatgaatgaatgcgcatttggaactaaagatccagtctacttagactatcatgatcatgtatggggacaaccgctctatgatagcaaggcattgtttaaacttttagcattagaatcacaacatgctgggctatcttggttaactattttaaaaaagaaagtagcctatgaagaagcattttatgatttcgaaccagaaaaggtagcacaaatgaccgctcatgatatcgaccgcttaatgacttttccaaatatcgttcatcatcgtaaaaaattagaagcaattgttaatcaagctcaagggtatttaaaaattgaacaagcatttggtagttttagtaaatttttatggtcttatgtaaatggtaagcctaaagatttgcagtatgaacatgcttctgatcgtatcacagttgatgatactgcaacacaactatctaaagatttaaaacaatacgggttcaaatttttaggtccagtaacagtattttcgtttttagaggcagccggtttatatgatgcacatttaaaagattgtccatcaaagcctagacacaattaatttgctatagcatcataaagtaaacgagacatcatctatttttaactaatagactgtctcgttttttaatgtagaaatttattcaaatcacaagttaaagttccatgttaatgcacttctaatattagatatcttaatttaaaaatagatgtaaaacctttgcttaaaccttaataatgaattctatcctaagcataatttaacttaaatggatgatagtttctaatcttcacgcttattcgaacgatattttaaaaagtaattaattcctggtgcaataataaataggatgaaaaagattcggaaaatatgataactcgtaatcatagcaacatcggcaccagtagctaatgcaactaaaactatctgattaacccctcctggtgctgcaccaagaaacaattcattaataggattattatcaaagaaatgtatgatataaaccatgattagcgcaccaattatcaacataatattttgaattgtaattgcgattgctagtctaccttttaaatctgacaataaatgcgcaatttgaactccaattctaatcatatatattagttgtgccatgttcaacaaccaatgatctagtgtaaatgttagacctgtagaaaaattccaaacaattaatacaatgagtggtgctaataattgaaatgttggaaactttattttagacataattagataaactataaagatagctatcgctaaaataactatttgccctatgtttaatacttgtgataaaggcaagacttttgttaacttaccattcgcatgcatgttaccatcatgaaaaaaatatgaaatgaacggtactaaaacaacaacaaatataattcgtgatgtttgcgttaagctaacaactaacaaattagcacgtttgtcttgttcagccatgaccaacatttgtgttagtgctcctggtataacacttaaaatagctgtttctgtattaatacgtgcaatttttttaaaaataaatgccattactaaggcaattaataatatcgaaatagatactacaataatcgaaagccaattgtctttaatatccataacgacatttttcgtaaacgttgatccgatttgcacacctaatagtacaattcctaattcactaagtaagaatggccatttaatatcaagtttgaaaacttttacacaaatgattgatgcgataataggaccaaacataaatgggagtaatacgtgcgatgaatacagtagaatactaataaaaaatgataaaacgaacacaatgaaattatttctatatatcattgtcatgttttccacttctttcaataaaaaataaaatgactaaattgctgcttgagcttcacgtttgttaagataacaatatccgctagcagttttgactacaaagcatatatggactttcactatcaagtcgccgccatgcctgatatacatttaaaaagagcctgaacaaagttcaggctctcaatttgtccgtatatttattttacaatacgacttaaagccgtatcaaatgcttgaattcgttttttcaatatcttctttcgtgtgtgccgtagataagaatgtaccttcaaattgagatggtggtaaaaacacaccttcttttgccatttcacgatacatttctgcaaataatttcaaatcacttttattcgcttgttcaaaattagttacaggtccttcatttaagaaataaccaatcattgaacctgctctatttacagttattggtacattgtgtttagcaaatacacgctttaaaccgtcttcaagtatatcgcctaacatattaaaatactcatatgtctctggcgttaattgacttaacgtttcataaccacttgtcattgcaagaggatttcctgataacgtaccagcttgataaatatttcctaatggtgctatatgatccatgatttcttttttaccaccaaaagcacctactggtagtcctccaccgataacttttcctaagcaagttaaatctggtgtcacaccaaagtgaccttgtgcacaatgataaccgactctgaaaccagtcattacttcatcgaaaattagcaatgcgccgtattcagtcgtaatatctcttaatccctgtaaaaaaccttcaatcggcggtacgacacccatattaccagcaacaggttctacgattacaccagcaatatcgtctccaaatttttcgaaagcgattttaagtgcatctaaatcattgtatggaactgtaattgtatttttagcaataccttcaggcacaccaggagaatccggcaatcctaatgttgccacccctgacccagctttgattaataacgaatcactatgaccatgatagcaaccttcaaattttacaattttatttctgccagtataaccacgtgctaatcttaaagtatccaatgtagcttctgtaccagatgacaccatacgcactttttctattgaaggtactcggtcaataacgagctgcgccaatttattttcaagtaatgttgatgcaccaaaacttgtacctttatcaattgcttcatgtaaatgactaataacttgagggtctctatgtcctaaaataagtggcccccaacttagtacatagtcgatatactcgttaccatcgatatcataaatttttgagcctttaccgtgatccataaaaattgctggtgtatctactgatttaaatgcgcgtactggactatttacaccaccaggcattaaagtttcagcaaccttcattgcttcttctgacttcgtatatctcataaagtaaattcctcctatagtttatggaaaatcatacatataaaaccttatttatctaaatagcgacaaatgtcctttgcaaaatacgtaataatcatatcagcacctgcacgtttcattgaaaccatttgttccataacgacacgttcttcatcaatccaaccattttgtgccgctgctttagtcatactatattctccactcacattatatgcaacaactggaacattcgtatgatttttaacgtctcgaactatatctaaataacttagagcaggtttaacaatcatcatgtcgcacccttctttaagatcactttctaattcacgaagtgcttccaaacggttagcagggtccatctgatacgtttttctatccccaaatgatggcgctgaatctgctgcatctctaaaaggtccgaagaaacttgatgcatacttgacaccataactcattataggaatattgtaatagccggcttcatctaatccacgacgaatttcagcaacaaaaccatccatcatattacttggtgcaataatatcagcaccagcttctacttgagaaattgctgttttaacaagtagtggcaatgatttatcattgtcaacgtcatgtgtatggtcatcaatcacaccacaatgaccatgatcagtatattcacataaacaagtgtctgcaacaattaataagtcatcatacatttttttagcaatacgtgttgcctgttgaataacaccatcgtgaatgtatgcaccagtacctatatcatcttttgagtttggaacaccgaaaaacataatggcacgtatgcctaagtcataagcttcttttaattcactttcaagtaaattcaaactgatttggtatacacctggcaatgacttaatttcttttttcacatcgtctttttcaactacaaaaattggatatattaaatcttcttttcttacatgattctctctaaccatatctctcattgtcgctgatgatctcaatcttctatgtctatcaaatttcatttttagcccctactttctaaaatcttttcaattagtgattcgagtgtttgaatttctgcaattgttactggctgttgatatgatttaatggtccgtgctgtttgttctccaatagcaaaatacgacttgaattttggtacaaatccttcattaaaataataacgtactgccgacgaacttgaaaatgttaatgcatcgatttgttgatgttctatcatttctttaacatcttgtatattttgtttgttaggcactgaagtatataaatctattttaacaacttcattatcttcagataacgctgctgataacaatggtctcgccaattcactcgaaggcaaaagtattttttggttagtttgattaaatgattctaaaaatccttcttgagaaaagtcgtttggcataaaatcaactcgaatgccaagtgattcacaatattgcgctgtcttacttcctatcacagcaatgttatcaacattaattccttttagatatttataaaagaatttcacagcatttttagatgaaaaaataagccagtcatagcgttgatttaacaaatgaatatcaaaatttagtggctttatatcaataaaaggtttgtgaataattgatactaaatcactttgcatgtcatttgtttgtgtcataactacaactggcttcatatttaaacgtcactccattatttaatgttgttcatttaagcgttttataatttcataagcaccttgctcttttaatttgttactcactttttttcctaactcaaccggatctgttccgttcattgtatattcaaatcgttctttaccatctggggtcataattaaacctgtaaattcgatttctttttgatctgagattgtagcatatcctgcgattggcacctgacaactaccatccatttctgctaaaaacgttcgttcagcagtcacacattttgcaacctcatcattatgtactttgcttaataatgttaatagttcttcatcgtcactacgacattctatccctaaagcaccttgtccaattgcaggtaacaatgtatctctatcaagataagatgttacaatatcatctgaccagcccattcttcttaaaccagctgcagctaaaataatcgcatcataatcttcagtttgtaacttttctaatcgtgtatctatattacctctaatccatttaatctctaaattaggatacttagataatatttgtgcaccacgacgtaatgaactagtaccaataatactaccttctggcaattgggatagtggtgtatgtgttttagaaatatacgcatcaaaaggtaattctctatcagggatacaacctaatgttaaaccttccggaattacacttggtacgtctttcagcgagtgtattgccatatcgatatttttttcaaaaagttcatgttgtatttctttaacaaataagcctttgcctccgactttagacaattgtttatctactatacgatcgcctttcgtgacaatttctttaatttcaatttctagatttggctcgacagcttttaatttatcaataaattgctggctttgtgttaaagctaatttacttcttctggagccaacgactaatttacgcatgttcaattcctcctaggaacggattgctctagattattttcttaattcacaaaatgtgttgcaaaaaataaattaatcatatttaagcaaaataaaataatgttatagtatattaaataccttgaattcaaccatttgttgattctaagtaaaatataacttccatataatactgtaataattgaagagagtattaccttcgggtcaatgaatatacgttcaccaactgaaattacaccccattgtgtacctaaaataatactaaatatgagaattatccacccacttaacgttgaataaaacacaattgattcaagtgtagcaacgctacctattctaaagtatttttgatcaaaacgcttttccttcaaattacggtattgcatgatatacagtaatgcattgacaaaagctaaggcaaagaagacataacttaacacagctagaccaatatggactaacagtaactcgtctacaacagcaattttctgaaccttattagtataatgtgtcggttgaaatgtattcatccctaaaagtgttaaccctattaaattcaagaaaaacacagagaaattcaaaactttgataaggttaagaattaaagagattgaaataatcagccaacttaaagtatagaatacatctgaaatagaccctaatggaatatgtttagtttgtataataaaaatagataaagagattgtttgtaaaacccaaacaatccccaataaatatatgcctaaacttctaatcttatgacttttttggacaaaatcataaaaatagcaaatgatactgattaagtatattaataatataatttcattgaatcgaataaacaggttttcttgcatattatcaccatattaatatgcttattcaaaactaaagatacgtcgcgctgaaatttccttgaccttgctttctttttgttgcttcgcttgctcatgaggacatttagcttcgatatcaaatatattttgaaatagctctaatttttcattacttttcttatcactacttaattctttggcctgtttaataggatctttcaacatttgattgatgatactttttgtatgtttagatataattttacgttctctttcgcttaaccctggcaatttacgatcaatactgtccatcgtttccgcttgaattgccatagctttttcacgtaaagctctaatcactggaacaacacccaacatactaacccactcattgtgtgcatgtatttctgcaggaatttgttccgaaattgttgcagccgctaattgtcgctcacgtaagtttgcatcaactaaaccttttaagtcatcaacatcataattaaagatgtttgtgatggcactaataccaggttcaatatctcgaggaactgcaatatcaatcaatactagtgaatcttgctttctattttctgcaattctttctatcatttcatttgtaatgatataagattgtgcactcgtcgaactaatcacaatatctgcactttcaagtaaatttggtaatgatgatagttcatcatatttcacttgatgctttgctgctaatttcatagcattttcaattgttctatttactactgtaatatcagtaattccagaaccaagaagatttaatagtgataattcactcatttcccctgcaccaataatgatagcttgcttacttttcaatttgccaaatacttttttcgccaactcgaccgcagcataagacacacttacagcattatcagctatatctgtttcattatgtgctctttttgcaaaagtaattgcctgtttaaatagatgattaaaaattgttcctgtcgtacctgtgctttgcgctaagaaaaatgcatctcttatttgacctaaaatttgagtttctccaagtacgattgaatctaaaccagaagtgacacgcaataaatgttctactgcttcgtcccccacttttacttctgacattgctttaatatcatctacttcaaatccaaatgcacgagctagaaatcgttgaatatagtaacgacctgtgtgaatttgatcaacaacagcatatacttcagttcgattacatgttgataatatgacattttctaaaatagatttagtttcatataaatcttcatgggcaattcgtaaggcatcatctctaaaagcaacttgctctcttagtgcaacatcagctgtgcgatgatttatactaattgcaataaaatgcatttgaaacgcccccatatatactaacaatacaaatattataacataatttaaaatccaattaagtacgatgcttaaataaattataatctttctaatttacttttgagtttttgacaaaatgatgaacgttgaaaaatgttatcaattgtgtactaattaaaagtttcgtgcttacattatttttaaaatttttgtataagttttgtcgtacaaaaactatgaaatatacggttcaattaaattccatatttgttgttgtttattattttgaattgatgaataacttacaattgtatcgtctgggtccatatctaattgtgtcttaatatttttaatatgcttttgaactttgccttttggaattttgtcttctttagtgcatataactaaagtaggaatatcaaaatgtttcaaataattgtacattaagatatcatcttgtgttggatcatgtcttaaatcaactaattgaataactaattgtaaattctctctcttagttatatattcctcaatcattttcccaaatttttcacgttgtgttttacttactttagcatatccataccctggaacatccacaaaaataagttgttcatctatattataaaaatttaacgtttgcgttttgccgggttgctgtgatgtacgtgccatattttttctgccaatcatactattgataaatgtagacttacctacattagatcgaccgctcagtgcaacttcagacaattctgtttctggatattgatcttcctttactgcactaatgattaattctatattattaggattaactttcattttatatcctcacttttttatattctctttcaactttaccattatataatatttgaacctttcggtatacattataaaaaagctccgatcaaagttaaactatttgagcgtcaactttgattggagcttttcacttttataacacatcaatgattaagctgatgttttactattattaattaaattaccttctgcgtcgtataattctggttcagtttcttcattaattgtttgtgctgtaataactaccttcgttacattttcgttagaaggcacatcaaacataatatcgattaacgattcttctatgattgaacgtaaaccacgcgcacctgtttttctttcaattgctttttcactaattgctgataaagcttcttcagtgaactctaaatctacatcatctaattccagcattttagtatattgtttcacaagtgcatttttaggttgcgttaagatgtttttcaacgcagttacatctaatgtttctaaattagctacaattggcacacgtccgataaattcaggaatcaaaccataggcttgcaaatcttctgggcgaatttgtgctaataatgcttgttcgtcatatttatcagcttcattgcttgagaaaccaataactttttcaccaagacggcgcttaatcacttcttcaataccatcaaaggcaccaccaagaataaataagatatttgttgtatcaatttgaatcatttcttggtttggatgtttgcgtccaccttgtggcggaacacttgcagttgtaccttctaagattttaagcaatgcttgttgaacaccttcacctgaaacgtcacgtgttatagatgtgttttcagatttacgtgcaattttatcaatttcatctacataaataatacctttttcggctttatcaatgtcaaagtcagctgcttgaattaatctcaacaagatattttcaacatcatcgcctacataaccagcttcagttaaacttgtcgcatctgcaattgcaaatggtacattcaacgtcttggctaatgtttgagctaataatgttttaccactacctgttggcccaattaaggcaatgttacttttttgtaactcaacatcatcttcttttggtcctaattgttgaatacgcttatagtggttataaacagccacagctaaagattttttagctttttcttgaccaataacatattcgtttaaatgatccataatttctttaggagtaggtaattctgtaatcgcttcagaagtgttttgagctaattcttcttcgacgatttctgagcataattcaatacactcattacaaatatatacaccacttcctgctacaagtttttttacttgatcttggtcttttccgcagaaagagcatttcaaattttcttcatcttcattgaatttaaacattctttttacacccctattcgttaaagactatactagattggatattacaatgcaacatattaacatacaaactttttgcttaaagaatagtagcagatacataagctatgcatctgctactcatttttgtaatttaatatttaatgaagattaatcttctttagttccttcaacgaactttgcgttatctcttaataaatcgataactttttgaatacgaacatcatttttaatgatatcagtattacctaaagtatttttgatatcttcaactgagatattaaattgtttactcattttttctaattctttatcgatatcttcatcagtagcttcgattttttcagcttcagcgattgcagttaaagttaagttagttttaacacgttgttctgcatcgtctttcatttgctctcttaattgagattcatcttgacctgagatttggaagtacgtttgtaaatctaaaccttgttgttgaattctttgtgcaaattcagacaccatacgatctaattcagtattaaccattgcttcaggaatatcgattgttgtattatcagtagctttagtaatcgcttcttctttttcaacattttctgcatctgtagctttttgttcagctaaacgtttacgtaagttttctttgtactcgtctactgtatttgcttctgcatctaattcattagcaatttcatcagttaattctggaacttctttaaatttaatttcgttaacttttgttttgaaagttgcttctttaccagctaattcttcagcatggtattcttctgggaatgttacgacaacatctttttcttcgtcaactttcataccttctaattgctcttcgaaaccaggaatgaatgaacctgaaccgatttctaaatcgtaaccttcagcttgtccaccttcgaattcttctccgtcaactgaaccactaaagtcgatgttaactgtgtcgccattttcaacaacaccatcttctttaactaccatttcagctaaatgtcctaagctgtggtcaattgcttcttgtaactcatcatcagataattcagtttcttgtttttcaatttcaagacctttatagtctcctaatttaacttctggctcaactgtaactgttgcttcaaaaatgaaatctttacctttttcaatttgagtaacacttacttctggttgtgcaactggtttaatatcagtttcgtcaattgcttcaccataagcatctggtaataaaatgtcgatagcatcttgatataatgcttctacaccaaagcgttgttcgaaaattggacgtggcactttacctttacggaatccaggtacgttaatttgtttaaccacttttttaaatgcttgatctaacgctttgtttactttttctgcaggaacagtaactgttaataaaccttcgttaccttcctttttttcccaagttgctgtcatgtatatatacctccatgattaactaatttattttttcaacttccctattatatcataggtctattccctatacaaacattgaaatcacaacgtttatatatttgtaaatcaacttttttcgtcaaaactatattaaaatgctgagtattattttgcaacaatttaactattattattcaaatctaattgctgaataaaattaaatgcatcgatactttgtaattcacatttaagtcctaacatatttttgaaataacattcgtatgcattaatccatttattcgtttcaaacaaagtttcaatatcaattggataaatcatgatagagtgattattcataatatggtgtgcttcttcagcgatatgtaaagcaccttcatttaatgtttccataacgttaggtataactttttctttcagtgttgtatgttctagcccttttaaattagctggtacaaaagttatatccataccatacttttcaattgtcagttcttgtgtacaatttgcgaaccttaaatactcaatcattaaactaattaggttataactgtacatattagatttcaatatatataataccgtttcttgaaattgaaaatgaccattgtctattaacttcaaaatcaagtgcgtctgttccctcattgataacgtatcaaaatcagttaatgactgtgtcaatcgtttttcatcttcaattaattttgacttagcaaattctttaagaggatgtaatgccattcttgttttgtgatctttgacctcatcaataatttgatgaattacttctaccgcttcaaaatattgttccaaacctatcaaacttttcacataataaatcatcaatgcatcatattgttgtatgccagttttcaataagacaattgtttcttctcttaattcaagaaatgaccccgtctcatataacatacggcatttcatcattgctatttcttcagtgagttcaaattgacgttcatattgtacaatatattcatacatcaggtcatagttttggtcttgttcagcacgttttatatctttatataactttttcgaagagttaggaaactgaataatatctgacatatatgtcacctcgtttgattataaatcttgaaggattaatgcgctccacgtctcgaaatcatcatatgactctatgttgcctttttcaacccattttattcgtaaagtatctgtttctttagcttctacatcattcgtacttacagtgattttaaatacaacaccaatatgtaccttgcccacttcgttattatcgtcattaataaaaccgatatattccatattttgtgaatcttgctcacttaaacctacttcttcttctaattctctctgtgcattaactctcaatacttcgttaatagattctgctcctggaacatcattcatatgaccgcctacacctattgaagattgtccatgcaatcgagcttctccaccgccagataatcgttcatacactaatatctcgccatgctcattttcaagtaaacaataagaaatgagttgtttatatgatggatcctcttccatatcgccgcgtcgcttaacttcatattgacttagcgcatcaaaaatattttgaccttctagtttattcttatttaaaaacccattgaaagtattcttttcattattaaaaataatttctctaggtactacaatgatttgttcatcaaatttagacatcgcataaaactcctcactttaatgtttgttctcttaaatgcattttagcaaatatgtcatattttagcgattaaatgtggcattttgctatttaaaaaataaaaaagagatgacaatgccatctcttttttataagtgttattattttaaagcatctttagctttagttactaattgagcaaatgctttttcgtcagaaattgcaatttctgataacattttacggttaatgtcgataccagcttttttcaaaccgttcattaaacgtgagtagctcatttcatgttgacgagctgctgcgttgatacgtgtaatccataatttacggaagtcacgtttacgttgacgacggtcacggaaagcgtattgacctgatttcattacttgttgcttagctactttgtataatgtatgttttgaaccgaagtaacctttagctaatttaatcgtttttttacgacgcgctcttgttactgttccacctttaactcgtggcataaaaaattcctccttaggtaattcctaccgatttctgtatttgttcttattttttgtatgctaataattgttttacacgtttcatgtcgctcttagacactaatctagctttacgtaattgacgtttttgtttagtgctcttgtttgcgaataagtgagatgtgaaagctcttgaacgttttaattgacctgaagcagttcttttaacacgtttagctgctccgcggtgagttttcatttttggcataatataagtcctcctgtaatagctttaattatttttcagctgttggcgctaacataataaacatttgacgcccgtccattttaggtttttgttcaactgttgctatatctttacattcatctgcatatttttctagcacacgttgaccaatttccttatgcgtaatggcacgccctctgaaacgaatagatactttacatttatcgcctttagttaagaatttacgtccgtttttcaacttagtttggaaatcatgttcctcaattgttggacttaaacgaatttctttaacattgataattttttgtttctttttcatttctttttcttttttctgttgttcgaatttgaatttaccgtaatccataattcttgcaactggtggtttcgcattcggtgcaacgaccactaagtctaaatctacacgttcagccatttctaaagcttcacgctttgatttaacaccaatttgttcaccatcttgactgattaaacgtaattcttttgcacgaattttgtcattgatttgagtttgatcttttgctatggttgacacctccaaaatttttacgaaatttgcaccaagcaaaaaggaagagcaggtataaaatacccgctcttcctaatacacagttatgtgtaatgtgattaacctgccaactgctttatgcgtcgctacaggtgagaagcgggtgcttctacttggttcgtttcgtattcaacgttgttaatcatatcaacaattcacatttaagtcaacaccataactgtaattatttttattttaaccttttatttcatccattgacacgtcttgacgtaaatctacttgttctaatggaattttcttcgttttatatcgaagcttatgataaataaagaatgctaaaaatactgggattcccatatacgtaattaagaagcgactaaaattaaaatctcctgttttaataaagtcaacatcttgaccgatgattacaacaatacataaaatagctgcaaaaataggtccgaacggaaaccatttagctgtatatttcaatttagatttatcataattttgtttatcaaatgcccttctaaatcggtaatgactcactgcgatacctacccaggcaataaagccagttaacccacttgcagcaacgatgtattgataagcaccttctgtaacactttgtaccacaaatatgatgactacaataattgcagttactaataaagacatatatggcacaccatttttatttgttttcccaaatgtttcaaacgccaatttatctttactcattgaataaagcatacgcgttgaggcatacattccagagttacctgctgataaaactgatgttaagataacagcattcataaatgaggctgcaaaagcaaatcctgcatttttaaaaactagcgtgaacggagaggttgcaacgtcattaccgcctcccattaatgcactactatcataaggaattaacataccgataacaaaaatggctaaaatgtaaaataataaaattctccagaatacttgtttaatcgctttcggcacagcacgttcaggattttctgattccccagctgtaatacctattaactctgtaccttggaatgaaaaaccagcaattaagaatacacctaaaatagataataaacttccgcctagatttccaccaagaataggaccttcacctttattaaatatttcgaatcctacaacatgaccacccatgattccgacaatcgttaataaaccaattgcaatgaaaacaataactgtaaccacttttatcaatgccaaccagtattcactttcaccatagacgcgaaccgataacgaattcagactaaaaattataactaagaacaacgcactccatgcccaagctggtatgccttgtaatggtgtccaatattgaatgacttgtgctgcaatcgtaatatctgctgctacagttactacccagttaaaccaatagttccaaccaagcgcaaaccctaaagatggatcaacaaatcttgtagcatatgtactaaatgagcctgatactggcaaataagtagccatttcgccaagtgacgtcattaagaaaaataccattattccgataattgcgtatcctattaatgcacccaaagcacctgcatcatgaattgctccaccagaagttacaaataaacctgtaccaatacaacccccaatcgcaatcatagaaatatgacgatctttaagtccccttttgacaacattgttactttcactttgaacttttgacatataagctccctttccatgttttagaggccaagtaataaataacctttatttactttcataccctttttttacagaatatagtgatattaaaagtaaaaaagtggctacatacctttaagatatgcaaccactttggcaattatctatataaggtagcacatcacattctgtgacagtacagttcctattcgaaaactgtcccaatagatataatttatggtttatatctatttcggcatctttacctttcacttgttcaacttatgtaccataaatacttctgacaagttactaattaaacatgcaacctctaactcaatttaatattttaactaacttgtaatatacaggattcatcacgcataatcaaccctgtaaaacttgatacgcaataaaagtttcaaagcattttattgcgacaactgtctatctatgttttttcaaacgaatttcatcaactagattccagataaattcatctttttcaactgtttcttggtcttgtgatccatattgacgcacattcacttgattattttcaacttccttatccccaactacgatttgataaggtattttttgcatttgagcttctctaattttataacccattttttcattacggtcatcaatacttacacgaacgccttgagatttcaattcatcttgtaattggcgcgcataatcataatgtaaatcaacgttaactggaatgatttgaacttgttttggcgctaaccaagttgggaatgcacctttagtttcttcagttaaaaatgctacaaatcgttccattgttgatacaacaccacgatgaataacaactggacgatgatgttcaccatcttgaccaatataagttaaatcaaaacgttctggtaataagaaatcaagttgtgctgttgataatgtctcttctttacccatcgctgttttaacttgaacatctagtttcggaccatagaatgccgcttcaccaatcgcttcttcgtacgataagccaagctcatccgctgcctctttaagcatattttcagctttattccacatgtcatcatcatcaaagtacttttctttatcttcagggtctctataacttaatctaaagctataatcctcgaaaccaaagtctttatatacatcaataatcatgtttacaacgcgtttgaattcttctttaatttgatcaggtcgaacaaagatatgtgaatcatttaaagtcatacctcgaacacgttgtaatcctgatacagcaccacttgcttcatatctatgcatagttcctagctcagcgatacgtataggtaattcacgatatgagtgtggtttattcgcataaatcatcatatgatgtggacagttcattggacgtaataccatagattcagtttcatctaactgcattggtgggaacatatcttcttgatagtgatcccagtgaccagatgttttgtataaatcaacattagcaagtacgggtgtataaacgtggtcataccccatgctaacttctttatcaacaatgtaacgttcaatttcacgtctaattgttgcaccgttaggtaaccataatggcaaaccagcaccaactaattggctatttgtgaataattctaactctttaccaattttacgatgatcacgttctttacgctcttctaacatttgtaaatgtgcttttaattcttttttatcaaagaaagcagtaccataaatacgttgtaacattttgttgttactatctccacgccagtatgcacctgctgtagataatagtttaaactctttaattttagctgttgatggaacgtgaactccacgacataaatcagtaaaatcaccttgactatataatgttacattttcatcttcaggaatcgcgtcgattaattctaatttgtattcatcattgctgaataactctttcgcttcatctcgtgaaaccacttttcgttcgattttcatattttcgttaacgatttgtttcattgttttttcaatttgttcaaagtcatcagatgagatgttttggtcaatgtcgaagtcatagtagaagccaccttctattacaggacctacaccaaatttaacattaccatataaccttttaatcgcgtgtgccattaaatgtgcagtagaatgacgtaatacctctaacgcttcttcactacctggtgtcacaatttcaattgatccatcagtttcaagcggtttagttaaatctacaagttgcccgttaaatttgccggcaacagcttttttacgtaatccaggactaattgattgtgctatatcttcagtagtagtacctttatcaaacgcctttttattaccatctggaaattgaatattaatttgttccatgttaaaccctcctatttgctttataaatacttttatctgacctcgttaaaaaattgaacaacaatcatcgttttaacattaaacctattaacaataaacagagaatttatgacaccaacaaacatttatgtctgaaaaaaaacaaaaaatcccgcccctatacaagggacgagatcgtcgtggtaccaccctagttatttaatacaagttatgtattaaatatctctacttaagataacggtcttgatccgggtattcattacaaataccataaatgaagtagtaatcatctaatttattaaccatattctcatcaaacaatggctttctgtgtaatattgattagatcatcttgtcttcaatcatttaaacgatttagatttgtattcattatacaccaatcattttaaaattcaattgtttctgaaattttctcctgataaaaagtatggtgttgacaaagatttgacacgttcaataatacgtgctgctttagtcttctcttcaccatcacgagtcatcgctaaatgatgttccaattcactatagtcaaaattagaactaaagaatgttggtaattcatgaaccattcgataatgtagcaaaggtccaattacctcatctctcacccatggagtcacttcttcagccccaatatcatcaagcattaaaatgtttgcttctcttacgcgatgtaatttcttttcaaaagaaccatctttaaagccaccttttaatgttctaataaattccggtaaataaataattgtcgaacgtaccttcttagatttgagctgattcgcaattgcacctagaataaaagatttacctgtcccaaatggaccataaaggtaaaggcctttcacttgttccccattagttattgctgtacaaatatcatctgctgccatagctacatcaagacggtctcgatgattcatataaatatctttcaatttggcgtttaaagtatctcgttgcatatgatgagatgtaattagctcagcttcaaagcgttcttcgtcgtacttgattttacatggacattgtaaatagcgtattttaattcggttattatcaacatataactcaggcacatgcccctttacgaaatttggacaatcagcaaatttatgaccgtcataatgtttttgttgatctttatactcttgtaacacatttaagtcttcatcaatcatagcattcgttaattcagctcgatgcgcttccaaaaattgcttaacatctgggtcattgattacttctttttttatcttttctattcttttttcaaagtcctgcgacgtgttaattatacttttaaattgcttcattattgactgtcctcctcccattttttagataatttatctagaaatgcttgtcgatcttgctctaattgttgatcatctacgctattatctttagccgaatcttgttcactaggtttatctctattttctaaccatttaggtgttttttcttttgaaatgcgattacgctgcccatagtatgaaccacgcttttggtaatttccgctagaaccctcatttttaggttgattaacttttttagcgtaattatatgcttctttagctgtcttaataccttttttcttccaatttgatgctatttccaaaatatacgctttaggaagtttcatatcttcttttaacatgacaaattgcaacaaaatattaatgacaccaaaagacattttttcacgttcaattaattcttcaaccaatgtcttttgcgatatagttggttctgattcagaccaagaagctaacatatcaattggactcgtttgttcaagtaattcaaaccattcatcactttgtggctttggattcgcttctgtagatttggccgtcgaagatgatgtagcaggagatttcacctgtaatttaggcatttgattttcgtgttccattaagtaatacgagcgtgcttgtttacgcatttcttcaaaggataactgttgtccacttgtaattgaatttaaaataacatgcttcatgccatctgctgttaaaccatataaagtcgcgagttgtgtaattaaacgctttgcatctttggtaacaatgtcttgactaataaaatgtttacctaacatttgtctcaacatttcaaaatcaaaagattcatttgataaatcgattccttggtacggttcattaatcggaatatcacttgtatcgatatctatttttgtagacggcactttaaaaacatcagtaaattgtctcgttacctgtttaaattcactcaaatcaatttgttggtactcaaagtatttcttcaactcatgaaatcgacgatgctcgacttcactatataaaaagattgacaacattggatcattaaaaaataaatgtgctgaaggcggttgaattaattggtaaacaaattgtgtttcttgttcatcatgtttgacaaacgcctttaacaatccaatcgcttcaagtaagtccatttgttgtctaaactctagtaaattaattttaagttcattcataaaaatataatgagaaagaatcaatgtttcattatgactttctttaacgaattgagtcataaaatggtataaacccactgcttgtgttccaattagcggtgtatacagtcgattcaatacctctaaatgattcgtatttaaatcaaagtgttgcataactttgaattgatcctttggtcttaagccgaattcaaaggcttgtcgtcccatttaagcatcactccgtttgttttcgcttaaaatcccttgcatcgatgctaacaattgatcaacatctttaaattctttatagactgatgcaaatctaacatatgaaacttgatcaacatgcattaacaagttcataacgtgttcacctatatctcgtgaagacacttccgtatgaccttcatctcgtaattgccattcaaccttgtttgttatgtcttcaagttgttgatatctaactggtcgtttctcacaagaacgcacaagtccattaagtattttttctcttgaaaactgctctcttgtgccatcttttttcacaactataagctgactaacttcgatatgttcaaatgtagtgaaacgtgttccacaattttcacattctcttcgtcttcgaatggcatttaattcatcggcatgccttgaatctacaactttagattgtgtagaattacatttcgggcatttcattacatcaccctctttattttgattatgcctaattatactataaatctagagatgaaaaaagaatccctcaatttaattcatttaaccaaataatgaaacaataaaaaacattatatcgttacttattaagtaataagcatgacaatattattatattaaaaataaaaaacctaactccgaggtcagagttaggctataaattaattgtattaacttgcacttacagtttcttttgatgtcaaaagtgctccaatttgctcagcgacatctacaactctatttgaataaccccattcattatcataccaagcaataacttttactttattccccgacataaccattgttgattttgcatcaataatagctgaatgtggattagtattaaaatcaacagacactagtggttgatgttcgacttcaatgataccttctaaacctgcattttcaaaagcttggtttacttcttctgcagttacttctttttctaaatcaacaactaaatcaacgagcgatacattctttgttggtacacgtaatgccatgccgtgtaatttaccttctaattctggtaatacttcttttaaagctttcgccgcaccagtagaagtaggaataatgctttcattacatgagcgtgcacgtcttaagtctttatgtggattatcaatatttttttggtcatttgtaatagcgtgaacagtagtcattaaaccattaactattccaaactgattatttaaaacttttgcaactggaccaatgcaattagtagtacatgaagcattactaaaaatgtcaaatgcttctatatctaattggtcatcatttacgcctttaactaccatttgaacatgtccaccttttgaaggaccagttaacaatacttttttggcacctgctttaatatgtgcgatggctttatcaccatgattaaatttaccagttgcatctatagcaatatcgatatctaattctttccatggcaagttttcaggattgcgatcagcaaccaatttaattttgtgatctccaacttgcaatccattttcaatcggttctacttttagattatattttccatgtgttgtatcgtaattgattaaatgtgcaattgtttcgggtggataactagcatttatcgctactacatttaaatttttattttgtaatgcaatacgtaataccattcttccaattctacccataccattaattgcaatattcgttgacattaaaagcaccccttgatttttatgtgttatactttatggaattagtatagcatattatatgaaatttgaaagcgttttccgttgatttatttatcttttttataaaaaatagtcattacttacatacatccacgcatacgtaaagtaatgacttatttatagagtaatattaatcttcttctccgtaattcggcttttcaatataaccttcttcttctaacaatctctcaaggttttgttttaattcaagtttatcccctaaattatcgataacatgatcggccattcggctttttttatcaatagaaatttggctatagacacgagcttttgcatcttctaatgacaaattattacgttgcattaaacgatccatttgtatactttcagaagtgtatacaacccacacttcgtctactgtattttccaattcattttcaaataataatggaatatccatgattacattatatccttgttttaaatattcttgcttttcttcttccataatatctcgcacgataggatgtatgatagcatttaattctaagcgtttttctggatggttaaacactaaatcacccatataacgacgattcatctcaccattttcatcaattgcttcatcaccaaagacttctcgtacttgagctaaacctttactcccctttttaacagcttccctggctgctttatcagcatctactactttaaaaccgaatacggataagagttctgatactgttgattttcctgaggcgattccacctgttagaccaataactttcggcataatttcactctttctttatttttgacatactggacaataatgactatttcttgtcgcgatgatttttgtttcaatttgacttccacacactttgcataccggctgcttatatacattgaggtgcaattgcatctcaccagtttttccatcagcatgacgataatctgaaatacttgtaccgccatgcttaataccttcttctagtacttctctaacataataaaaaaccatttcttgttgttggtgtgttaagtcttttacttttttatctggtaaaacacctgcacgaaacaacgcttcacatgcgtaaatatttccgcaacctgcgattactttatgatccaaaatcacttgtttgattggtttattcttattagactgttgatgaattcgatttaaataatacgtcaatgcttcatttgtaaaaggttcaggcgctatttccagaaatgaaggataagatgctacagacgcaacatttctaatttctccaaaacgacgtatatctgaataaattaactttttgtcatttgacagctcaaaaataacatgccaatgcttacgataattaggtatcataatatcttcaagttcatctacaatgaaaaaaccacccgccatacctaaatggctaattaatgtacgttgttctcgtttattatctagttgaaaaacgatatatttacttcttcgttctacattagtaatggtatagccttccgataaagttttaaaagtatctaattcaattccttttataattgtttccttgccttgagctttaccttcgattactttatccgaaaatataacgtgttcaattttctgatttataacgtagggttcaattcctctttttacatgttctacttctggtaattcgggcacaccattaacctcactttattttgcatcataccaagttgcaccataacttgagtctacttttaatggaacatctaattgcaatgcattttccattatctcttctacaaattcactaaatgaatctacttctgacttaggtacttcaaaaattaattcatcgtgtacttgtaataatagtttagcttgatatgttgtctctttcattttttgcgcaaatttaaccattgccagtttaatgatatctgcagcactgccttgtattggcgtattcatagcagtacgttcagcaaagccacgtaaattaaagttacgactcgtaatatcaggaatatagcgtcgacgatgtagcaatgtttccacgaaacctaaagctttggcatcttttacaatatcagacatatattgttttacacctgggaaactagctaaataatcatcaatgaatgcttttgcttttttacgagtaatacctaaactttgacttaaaccataatcacttatcccataaacaattccaaagttaaccgcttttgcttgacgacgcattaaactatcgacttgatcagcttctacaccaaatactttcatagcagttgctgtatgaatatcatcgccgttgataaatgcttctttcatactctcatcttgtgtaatgtgtgctaatacacgcaattcaatttgagaataatctgctgataatataacgctatcttttgaagttggtttaaaggcttttcttattttacgcccttcttcaagtctaaccggaatattttgtaaattaggatctacacttgataaacgtccagtttgcgctaaagtttggttaaaacgtgtatggatacgttgatcatcactaattaccttttgcaatccttcaacataagtagactgcaacttagataattgacgatattctaaaatataatcaatgataggatgttcaccttgcaattgctctaagacatctacagcagtagaatatcctgttttcgtctttttaataacaggtaattgtaatgtctcaaacaatacaacacctaattgcttaggagaatttatattaaaatcttcaccagctgcatcatggatatttcgaatcaagacgtctaatttttcttgaatttctttttccatttcttctaaatcatgaacatctgtatatataccaatttcttccatttcacttaaaatcttagctagcggtagctctaaatcagctaagagttctacctgattgtattcttctaattgtttatccatatttggtttcgcaaagtaaattgcatcagtaatagaagcaacatatggatttaaaacatcatcttcaggtaccttaaatttcttaccttttccatatatactcacatcgtctttcacaaaactttgaccgtacaatgaaacaactgattgaacatcactaatcgtacgagatggatcaattatataactggccaacataatatcgaatgaaatattttgaatatcaattcccaatctatgtgatgctacatatgtttttttagcatcatatacgacttttttcgtattcggattttctaaccatgaaactagttcagcataattaattatgtcatccgcattaattacaatatgtttctcacctgtaaataaagagaattttaaaatattatttcgcaaatagttgccaccgtctaattcgaaatggatggtcgcttctttcaatgaagtaaaatcaacattatcaaaagacgtttcaatttcaaatgtcttttctattgcatcttcaccacttgctgattgatcaatgtcagccaacaattgtttgaattctaacttcttaaacaattcgattttttcttgttgttcatcttgatgagtcattaacgtatcttcaagttttacttcaatcggactatctacattaatcgttgctaattctttactcattaatgcatcttctttgctgttttgaagtttttcttttaactttttacctgaaatttcatctaaatgttcataaacaccttctactgtgtcaaattggttcagcaattttattgctgttttctctccaacacctgcaacacctggtatattatcagaagtatctcccattaatcccttcatatcaataatttgattaggtgttaacccgttgtatttttcagcaataaagtcaggtgtataatgatcaacatcagtaacaccttttttagtgtaataaatggttacattatccgttgcaagttgtgttaaatctcggtctcccgtaataataattgtctgaaagcccgctttatctgcttctttacttaaagttccgataatatcatctgcctcatagttatctaattcataacgtttaatatgataagcatctaataattggcgtatataaggaaattgctcacttagttcaggcggcgttttctggcgtccacctttatattcactatatttttcatgtctgaaagtcgttttacctgcatcaaacgctactaaaaaatgatttggcttttcttcttttaaaatcttctctagtaacattgcaaaaccatatactgcattggtatgaatgcctgctttgtttgataacaaaggtaatgcataaaaagctctaaaacttaagctattaccatcgattaatactaatttattcacaattttaacctccagaactaatttatatatattttagcatattcgactgtgatgtcgtaattaaagaaactatctcatagagtatttatacacgacctaatttcaaataaaacaagtgactatatagactaagctaaaaaataaaaagacataatcatgattgttcttgatgagcactcaataaagtcaggttaaaagtccaacttttgagatgcacattatcatttcatgattatgtctactttttaatatttttatgctgctattataaatttttataggtaagaataagttatgaatcgtcagaaccaaatggaatatatttaactttggtcattttcggtaattcttcataattattaaaccactcttggtaatttttattgattggtgacggatgatgcatataatgttcaaacggcaatgattccactgtataaacctcttgtcgtggatgatctttaatttgttgttttaataactgaactcttttttcatgttcataatgaacataaataaatgcactaagatatatcacagctaaaactagtgatgcacctttaataaaattaacattgattgacttatatttccgaaattcttttaataaaataattaaaatgattacatgtatcgtataaacaatcaaaaaattacctggttcaattggagtaacaatgactagtgtcgacgccgaaacacatattgaaataagtaaggaatataaagtaatttgtgttttacgatcattaatagacaaataaatacctacaaatatcgaaaacgcaaagtaaccacatacaattatgttcgcaaaaccaaccaatccaatatctgtatttttatttaataaaaactgattgtaaaatagtaaataataaagcggtaaagtgataaatcctatcataatgatacgacgctttaatattgttaaatgtaaataccgatcacttctaagcagtagataaataataagcgctgcaatcatacttaaaattataacctgactgaaaatgacaccatatggaagtgatgtcgatatcatttctgcaaattttgaaaagataccttgattattagaaacttgttgatattctgatccttcaaataaaattttgcgataatttggattggaaaacataatgattgtacctatagtagcaatcataaatgaaaacaataatttataattaagtgttcgatttgcagtaaattcatacagaaaagctaaaattaaaatgatacagtggaataatgtcacattctccataaataattgaccgaagaagcttaaaacatagaatagtactgtaacacttaccggttgcttttctttatatataattgcattaatacaataataaatgataaagagtgaaattagtgttgatgtcgcataattataaaatcctgcaaaccagccatatgtatctgcataaatagcacttggtaaaattaacatcaaagaaaatgctaacaaataatagcttgtccacgctttacaacgtgtaatgtgcataatcatccaaatgatacccatactaatgagaccatatgaaagccaacgtaaccagcttacatgtacagctataatttcaaagatatttccgatatagcgaccattaagtgatgcaaatcctacttttaaaatatcagtattataattgctaaaccattgtaaatcatcgtgcatgagtggtagtaagatacccataaaagtataaaacaataatatcgcaattaatatcaaagttgtcttgtgtaattgaattgttttcactttgctaatcctcaaatctagttaaattttcctcaacttgtaggtcgaaaaattaattcaatatttttaatgtatttctaattttcacctatgcatgtttcctcaatcaaattagataaacaaggtatttaatattacttttcaacattttatctaaatcgtccctcgtctttttctatgacgaatgattacacttgtgtattcaagtgtttaaattaagatttatttccgttcaaataaaacttattactttttaattaagcatctattttaagcgtgttactaaaatttctttattataataaatatattataaaattgcttgattcacaacaatctattacttataacttacaaaacgacatatgcaaatgacaaaattgacaaccgaatatattccacttcattaactctaatttaataccaatagagatttgaacgaaataaaaaagcagcaacaacttcgtgaaaaatacacgcgctgttaccacttttaatttttattctttataatcttttagaataactttgaacgttgagcctttgccaacttgactattcacttcaatattgccttggtgggcctctactatatgctttgtaattgataatccaagacctgtcccaccagaatctctacttcgtgctttatctactctataaaatctttcaaaaatacgttgttggtcttctaatttaatacctataccaaaatcttgtacttcgaaaatgacacgaaagtcatctcgatacacacgaacgttaatatctccatcttcataagaatagttaattgcattcgttaacaaattcgtgataacttgagcaattttactttcttgtgctttaacaatgacatctttttcaatttcagtatgaatggaaatatttttttgattggcttgagtcatcatattatcaataatacgccgcgttaaatctgataaattcatatagtctgtatctaactcggtatgttgctcaatatgcgataaatctaacagatctgttactaaagattctattcgatttgattcttttaaaattatgttcaaaaacatgtctaatgattccgcatcattttttgcaccatcaataagtgtttcagcaaaccccttaattgaagtaataggtgtttttaattcatgtgaaacatttgctacaaattcacgtcttagattttcaagttgtttcagatttgttatgtcatgcatcacaactaaaatcccttgcaaacttttttgagatctagttaaaatcggaacacaagaaatatcaaagtacttggcatggacttggtttattgcaacttccaattgttcatagataggtttttcaactttaaaactttctaaaattaattgctcaatttcagtattaacatagccgtgatagcctacttgttcaatattatgcgagatgttgaactgttcataatacgctttatttgcaacaacgatttttccatttcgatctatcattaaaatagcacttggaatattttcaatcgttgtttttaaacggttggattgaattttttgctcattattaagcttttgaaggcgtcgtgctaaatcattggtagacacaaaaagcgctttagtttctacaacattactttcaggtacacgtatgtgataataaccatttgccaacaattgtgttgcataagtaacttcttgaatgggacggattaaagtacgcttaaaactacggcttgcaaaatacagacaaataagtacaactaaacatgtcaatataagatatttccacaacgtccaatgcatttctgtaatatcgttattgtaacctttaatccatacatgataaccgttaaccttcttattaaaaataaaaacgtcctttttttgactgtaattatcaattgttttagtaggtttcagtttgccactactaaacacctttttatcatttttagttatcaataaatcaatattttgctgttttacaatttctttaactttatcaatctcattatcttggactaaataaatatatgatcttgcatctgttgctagagcttgttcgtgtttttctgataaaacatatgtgatggaagcgtgaataataatgcctaatgtaacaaaactgataattaatatactgcttatcaataacattaagcggtggtgaaacttcatcattattctttaggtctttccaatttatagcctaagccacgcacagttttaataagttgtggcttcttaggattatcttctaatttatctcttaaatgactgatatgtacatcaacaattcttgagtctcctgcaaattcataattccataccgtatttaacatatgctctctcgtaatgactctgccttgtctttctatcaaataaagcaacagttcaaattctttcggtgttagctccaatagctcattatgcttatatacttcaaaataatcgggtctaatacgtatcgatccgatggtaatatcatcgtcaatctcttctacttcttttacaaattgagaacgtcttaaaatggctttcacacgggcaacaacttctctaggtgaaaaaggcttagtcatatagtcatcggcacctaattctaaacctaatacccgatcaaattcatcatttttcgccgttaacattaatatagggactaaatttttatttgttcttacagtcttacatacgtcaatgccatcttttttaggtagcataacatctaaaataattaaatctggctgttcattttctaccttctctaaagcctcatcaccatcaaatgcgacaacaacttcataaccagctgtttctaagttatatttaagtaatgttacgattgaatgttcgtcatctactaccaacactttttgcgacatggtatgcctccctaacttataattatatttacattataaccgaactatttataaaaataacatcctacacattatctttacacattttttacattactttacacataaataaaatacttcttttatttccttctataatttgcatgacatactctgggacaacgaaataaattttgtgaaaatatcatttctatcccactgcctatgcatgagttttactcatttattcctaagcttatatacacattcgctttagttaatgtgtaagaaacactacataatcaatcattcgtgactctttatcatttctatcctgctgccaacttcaattcatttaaaaaggtgaacctagcaattaaagttgctagactcacctaagtttattttgcttattttaaatttttaatcaattcatctgcaaatgctgatgtagaaacttcttcagcaccatccattaaacgggcaaagtcataagtaacaacttttgaagcaattgtatcttcaattgaatctgtaatcttatctgccgcttcttgccatcctaaatgttctaacattaatacagaacttaaaattactgaagatggattcactttatttaaacctgcatattttggagctgtaccatgtgttgcttcaaaaatagcatgacctgtttcataattaatgtttgcacctggcgcaataccaataccaccaacttgtgcagctaatgcatctgaaatgtagtcaccattcaagttcatagttgctacaacatcatgctcagctggacgagttaaaatttgttgtaagaaaatgtcagcaatagaatctttaatgataatcttgccttctttttcagctttttcttgtgcaacattagcagcatctctgccttctttttcaacaatttcgtcatattgttgccaagtaaatacttgatcaccaaattcagttaatgctaaatcgtaaccccactgcttaaatgagccttctgtaaatttcataatattacctttatgaactaaagtaactgatttacggttattatcgatagcatattgaattgctgctctaactaatcgctcagtaccttctttagaaactggcttaataccaatacctgaagtttctgggaatcgaatatttgtcgcacccatttcgttttgtaagaaatcaattacctttttaacttctgttgttccttctttaaattcaataccagcataaatgtcttcagtattttcacggaaaataaccatatcaacatcttgtggacgtttaacaggtgacggtactcctttaaaccaacgtaccggtcttaaacaagtaaataaatctaattcttggcgtaaagctacatttaatgatctaataccaccaccaattggtgttgttaaaggtcctttaacagcaattaaatattctttaattgtatcaagtgtttcttgaggtaaccattcgccagttgtatcaaatgctttttgaccagctagcacttctttccattcaatgcgtttttcgccattataggctttctcaacagcagcatctataactcggcttgctgccttccaaatatccggtccaattccatcaccgataataaatgggataattggctcattaggtacgtttaatccttcagttccttgagtaattttttctgcagtcatagttattttacctccaaattttacatcttcatttttaatttgtattgattattttctttcttcaagcggaatatacttacgattcgtttcgccaatatattttgctctaggacgcataattctattatctttatattgttctaaaatatgagcaatccatcctgcagaacgacttacagcaaagattggcgtgaataagtcatgaggtatttccatacagtgataaacactcgcactataaaaatcaacatttggaattaatcctttttcttctgccatgcgtttttccattttcactgacatttcaaataattcttcacgaccagcgtctttcgtaatttgacggctcatttctcttaaatatttcgctctaggatcaccatctttatatacacgatgaccgaagcccattactttatctttattagcaaatttttcatctaagtaagcatcaacattttcaattgacccaatctcagataacatcgtcataacttgttcatttgcaccaccatgtaatggccctttcagagaacctacagctgctacaatacctgagtacatatctgacaatgaagataccgcacaacgtgctgtaaatgcagatgcgttcaactcatgatcagcgtgtaaaataagcgctttattgaaggcttccacttctatatctgttggtaattccccacgtaacatatataggaagtttgctgcataacttaagtcaggattaggcttaattggttctttatcttgtcttactcgagcaaacgctgtaactaatgatgctactttagcctgtatacgcattgctctttcataacgattttcatctgattcattttcagcatcaggatcgaaatgtgcaatatatgataatgacgtacgtaatgctgtcattggatgcacgtgatctgtaacatactcctcaaaatgtgtatacacacgaggatttaatgtcatgtattgatttaatttcccctttaaatgagcaagctcttcttcatttggcaatctatagttccataataggaaaataacttcttcaaattgcgcattttcagctagatcatcaatatcatagccggcataagtcaattgactttcaataattgaacttattttagtctccgctgcgataaccccttctaaacctctttgtaattctgccatgataaatttcccctttactgtttctttatgaaatggctttcaactaatattatagctaaacgcatttcgtttgtgaaatataaaaactggcattatatgtgcaacaattattttgtaaatctatgtaaatgtcacagaatggccacaaatagcaccattaaagctttttcaagattatattcatcaccaacttttagcatagaataaaattttcaattggttattatatatgattataaaatccaaagtatattaacatggaattttacacatttttaccgaaaataattgtatatatcctaatataagtgcataataaacatatctatatttaagggagatgtattatggctgaaaaattacaaagggaactgagcaatcgccacattcaattaattgctattggtggcgcaattggtacagggctattcttaggcgctggtcaaacgattgcattaactggcccttctatattactaacatatatcattattggatttatgttatttatgtttatgcgaggtttaggtgaaatcatcattcaaaatactgaatttaaatctttcgcagatgtaaccaatacatacattgggccttttgcaggattcgtaaccggttggacatactggttctgttggattattacaggtatggctgaagtaacagctgtagcaaagtatgtaagcttctggttcccagaaattccaaactggattagtgcacttttttgcgtattgttattaatgtcttttaacttattgagtgcgagactatttggagagttagaattttggttctctatcattaaaatagcaacaatcattggtttaattgtcgtaggtttcgttatgattctatttgcatataaaactcaatttggacatgcgagtttcacgaacctatacgagcacggtgtattccctaaaggagcatctggattctttatgtcattccaaatggccttattctcattcgtgggaatcgaaatgattggtgttacggcaggtgaaacgaaagatcctgttaaaacaataccaaaagcgattaatagtgttcctattagaattttaatattttatgtcggtgctctagcggttatcatgtcgattattccttggcaacaagttgatcctgataacagtccattcgtaaaattattcgcattaattggaattccatttgctgcaggcttgattaattttgtagtactaactgctgctgcttcatcatgtaacagtggtattttctcgaatagtcgtatgctgttcggtttatcaagtcaacaacaagcaccaccgaatttctctaagacgaataagtatggcgttccacatgtagcgatctttgcttcatcagcattgttactcgtggcagcattattaaactatattttccctgatgctactaaggtatttacgtatgtgacaacaatctctacagtattattcttagttgtttggggactgattatcatcgcttatatcaattatagtcgtaaaaatccagatcttcataaaaaggctacgtataaattatttggcggaaaatatatgggctatctcatttttgtattctttatatttgtgtttggcctattgtttatcaatgttgaaacaagacgtgcgatatactttattccgatttggtttatactattaggatttatgtacttaagatataaacgtatcgctgctaaatcaaataactaacaacaagttttacccctgttgaatatattaaagttcaacaggggtttttatatgcaacttataatattaaattgcgtacttgcctcaatacttttactttctcatctattgaataatgtatcattttaaagatacatccatacttctattttataataactttccaaagtaatatgagtgaaagtttaaagctgataatgtgcatgtataaaagatataaacatttatatagattgctattcatacattatcattatcaaatatcctattaattacgtcataaaataccagatgaaccaaaaaacgcctttccattgttgataaatggaaagacgtttttttataaattatagtacgtttgcatatccttcaaagattttaccttgagcagcatcaatcgtaactaacacgttattgcttatgtttttaacagctttttctacacctacaactgttggaatacctttttctaaaccaacaattgcacttggtgatgtaattccattttcttctgtaattaagcctaacgctttttctacataaggtacaaacgtttcatcgattgagtttgtaacgataactttgtcagataaatctttaccttctaaatctttaacagtttcagcaactaacgtagtaccaacaactgatccacgtccaataccttgaccattagcaatttcgtcaccaactaggtggattttcatcatattagtagttccagtttcaccagttggtacaccagcagtaataatgattaaatcaccattagttactctaccagtttcaacagctgttgcaactgcattgtttaacaatgcatctgtactcttacgtccttttttaactacaggttgaacaccccaaacaattgaacattgacgtgcagtttcttcacttggagtcactgcaataatgtctgaatgcggacgatatttagagatagtacgtgccgttgaaccactttcagtagcagctacaattgctttaacatttaagtttaaagctgtatgtgcaaccgaaataccgatagcattcactaatgaagtttcaactaatttagtacgatctgacaataactttttgtaatcttgggctgcttcagctgatacagcaatatttctcattgttttaacagcttcttcaggatataaaccagcagcagtttcaccagataacattactgcatctgtaccatcatagattgcgttggcaacgtcactagcttctgcacgtgtagcacgtgggttacgttgcatagaatctaacatttgtgtagctgtaataactggtttacctaatttgttacattgtctgattaaatctttttgaaccattggtactttttcaggtgggatttcaacacccatgtcaccacgtgcaaccattaaaccatcagacacttcaagaatttcctcaatattatcaataccttcttggttttcaattttagggaatactgaaatgttagctttttgttcttctaaaatttcacgaatttctaaaacatcactaggacgacgtacgaaacttgctgcaatgaagtcaacattttctttaataccgaaacggatatcttcagcatctttttctgtaataccaggtaaactaactcttacaccaggtaagttaacaccttttttgtttttaagctcaccagagtttaaaatatcacatttaacttcttttttagcatggtcaatatctttaacttgtaattcaattaagccatcatcaagtaaaatgtatgaacctacttgaacatcgttaattaagttttcataagttacagagaacttttcaggtgttccttcaacttcattcatgctaacaataacttcgttaccacgttcaagttcaatgataccgtctttcatattatgcgtacgaatttctggacctttcgtatctaataaaattgctacaattttgtctaatcttttagctactttacgaattgtatcaattctacctttatgctcttcatgactaccatgtgaaaagtttaatcgtgcaacgttcataccagcattgattaatttctcaatcatttcttctgattctgaagctggtccaattgtacatacaattttagtttttctcattttataattcctcctgaaatcttatatagataacttgttagcaagttcatatagactataatcaaatttatgatctttaccatcaaaaatttcatcaaaagatgttgctacaattttattgttcttaattccaacacctttagctgtttcaccttgcattaataagtctaccgcatatccacctaatcgtgatgctaaaactctatccgcacctgttgggctaccaccacgttgaacgtgacctaacacagacactctattatcaacattgatgaattgtgataattctttttgacaatcttgcgcagtcatacaaccttctgctacaagaacgattgagtgtttcttaccacgtttaataccttgttcaattttatcagctatttctttaatatctgttttcacttctggaactacaattgtctcagcaccaactgataatccagcccataatgctagatctccacaatcacggcccattgcttcaatgataaatgttcgtgcgtgacttgacgcagtatctctaattttgtcgactaagccaataatcgtatttaatgctgtgtcaaatccaattgtaaaatcagtaccattgatatcattgtcaatcgtaccaggaataccgatagtttgaatttctttgcattcctcactgatgcgttgtgcaccgcgataactaccgtcaccaccaataactacaaggccctcaatccctcttttacgtaagttttcgattgccactttacgtacttcttgctccttaaactctggacatcttgctgaatacaagaatgtacctccacgctgaatcgtatccccaactgatcctaattcaagtttatgaatatcatcatttaacaatccttggtaaccatgatacacaccataaacttcaatttcattgtaaattgctgtacgaacaactgctcttacggcagcattcattccaggtgaatctccaccactagttaaaactgcaattttcttcatgacgacatacctttctataactgatttatctttaactctaaattaccacaaattgatatgtcattccatcaaaactaatgtattgaattgatgtaaacgttttaaatattgaattttattttaacttaattaaaaaaagattagtagccacaattttgactactaatcttagttaaaattcagtatctaaatattgaattattgttttaatgtacttcaatttatggtaaaacccagtaacgatttaacataaaaatgcttaagttgattattctatataagaaccgatatttctgaatttttcaaaccgatcattagcaatttcatcacgtgataatgactcaagtgaatctaattgttcaacaaacgctgatttaatagctaaagcttgttgttcaatatctttatgtgcaccgccaagtggttcagaaatgacatcatctataatacctaattgcttaatatcatgggcagtaattttcattgtttcagctgcaattttagccaaattactgtctttccataataatgccgctgcaccttcaggagatataacagagtaggtactattctctaacatcaatactttattggcaataccaatacctagggcacctccactgccaccttcaccaatgacaatcgcaataactggtacttttagtgaagccatctcaatcaaatttgttgcaatagattcactttgtccacgttcttcagcagctttaccaggatatgcaccttttgtatctataaatgtaaagataggacgattgaatttttcagcttgtttcattaaacgtagtgcttttcgataaccttctggatgagccataccaaaatttcgataaatattatcttttgtatcttttccacgttgttgtccaataaccgtaacagcacgaccatttaaaaagccaataccaccaatcattgctggatcatctctaaaattacgatcaccatgtagttccataaacgaatcaaagatatatggaatataatctagtgtcgtaggtctttcttgcaaacgcgcaatttgcacacgatcccatggttttagatttgtatatatttttttagtttctcgttccaatgacgcttcaagcatgtcaatttcttcttgtaaatccacatcatttttatcttgagattcttttaaagattcaattttatttcgaatttcaaaaagtggtttttcaaaatctaacattatttagtcacctcttgatggatttttagaatttcagacaatgtttgacgcatatcattacgatgtacaactttatccaattgtccatgctctaataaaaattctgcagtttggaaatcatctggcaatttttcgtttattgtctgttcaataactcgacgacctgcaaaacctatcaatgcttttggctcacttagatttatatcaccaactgatgcaaaacttgcagatacaccaccagtagttggatgtgttaaatatgatatatataatagtccagcgtcagaatgacgttttaaagatacactggttttacccatttgcatcaaggaaataataccttcttgcatacgtgcaccaccacttgcagagaaaagtataaatggtaaacggttctcagtgcagtaatcaatgatgcgacatatcttttcaccaataaccgatcccatacttcccattctaaaacgtgaatccatgacagcaacgccaaatttcataccatctagttgcgctgtaccagtcactactgcttctttaagacctgtcttttgttggtccttttcaattttttctaaataacttggaaaatctaatggattcgcagaggtcattcccttatcgaattctgtaaatgatccttcatcagaaattgcttctatacgtttatacgcagttaaagcaatatgatgatcacaattaaagcacacatttaaattttcagctaattcttttgtgtacataattttcttacactttggacacttagtcataatacctgcaggcacatcattatttttagagtcttgtactgtaagatatttctttttctttgttcgattaaaaaaatctttaaacataggaaaacctccaaataacctctgttctaaccatttagagccttaaactgaacttgaccagttaaaaacgggtttaaatttatttgatttatattcgtttgactgttgaatgtttatcataaactttcattttcatcattttaatgactctttattgctaacttttaagcactttaattaaacgttaattatttttattgtaaatctgtaagtttcattgttttatcatacacatcttgcggatcaacttcaatcctagctactccagattccattgccgctttagcaacattacgagcaactgatggcgctacacgtttatcaaacggtcctgggatacagtagtcttcatttaattcagaactatcaattaaatcagcaatcgcttctacagctgcttttttcatttcttcatttatatgtgtagcttcaacctctaatgcacctctaaaaataccagggaaagctaatacattattaatttggttaggatagtctgaacgtcctgtaccaacaacgcgtgcacctgctgctttggcatcatcaggtattatttcaggatttggattagccattgcaaatataattggattatctgccatactcttaaccatatcttgtgacagcgcattagctacagaaactccaataaatacatctgcgtcttttacgacttcttctagagacccttcaatcttgtctttatttgtccacttagctacaacatctttcgtaggattcataccatatgaacgtccttcaaaaattgcgcctcttgagtcacacataaccatatttcttacaccatacgcgtatagtaatttaacaatggctattcctgctgcaccagcaccatttagtacaacttttattttagcaatatctttgttaacaactctcaatgcatttaccaaacctgccattgttacaattgctgtaccatgttgatcgtcatggaataccggaatattagtttcttttttcaatcgttcttcaatttcaaaacaacgtggtgccgaaatatcctctaaattaataccaccataattaggttctaacaatttaactgttttaatgatttcttcggtatcagttgtatttaacgcaataggcaccccattgataccagcgaagcttttgaataatactgctttaccttccattacaggaatacttgcttcaggtccaatgttacctaaacctaataccgctgttccatcagtaataactgcaactgtatttcctttaattgtgtaatcatatacttttcttttgtcttcatatatatctttacacggttcagcaacgccaggtgagtatgctaaacttaattcttctttattagtaacttttacatttggtttaacttctaatttaccttgattacgtttgtgcatttccaatgcttcatctcttaatgacatgaaatcagcccctaattcaatatttatttttaaaaaataacttggataaaacgcattacattataaaagtaaaaatattgggtatatctgaatgagtaagaacttatagttttaattatgtaacacaaatagcgataaacgataataaaataatatttataaagatacattaaaccatactatctaaagatatacctttaattattataatggatagcaaaaccaatatatcaaaaagttattattttttctcacgatatatcgacaaaattctttactcaatttatgtatactgctttttgtgctaattattcttatggattaatcaataatgtaaagtgaaactcataaaaataataagcataaaaaactaatataaacgtaaactgatggttaaaaaatatctaaccatcagtttactatatcataatttattagttgataaaagttatataagcctaatatcactagggttaaaggattgtataaaattattaaacatactatctttttgattaatatagcctaaagtagtcatttgtttaatcgtttcatcataaaaggataacacaacatcattagcattctctttcgtagctttaatcatctcttcaaacatatctatttgtgatttatttctaattataatttgtttggcaaatgctaatttttgttcttcaaaagtggctaatgtctgaatctcatttataattaattgacgttgttgctttctaaggtcaaatttcccgctaactataaataagtcattatgtgataacaactcttcgtactttttaaactgattagggaaaatcacaccatctaaagtttcgatgccatcatttaatgtgacgaatgccatattttgaccatttttagttcggatttgtttaactttatcaaactgtactaatataggcttattattctgcgcgttactcaatttaaatatcgttaaatattgtttggcaacaaacttcttatctactgggtgttgcgaaacataaaatcctaaatattctttttcatactgactaataagtgcatcaggcaattcttctttatcttcatacatctgttttggcgttaaaatatcaaataaaaaaccatcttgttcaatgtttaaatcaccatccaacacttgatcaatagcttgcaacaacgttgaacgtgttttaccaaaagcatcaaacgctcccactaaaatcagtgcttcaagtaactttctcgttttgactctcttcggtatacgtctagcaaaatcaaagaaatctttaaatttgccgttctgataacgttcttcaacaatcactttcacactttgataacctacacctttaattgtaccaattgataaataaatgccttcttgggaaggtttataaaaccaatgactttcgttaatgttcggtggcaatatagtgataccttgtttttttgcttcttctatcatttgagcagttttcttctcacttccaataacattacttaaaatatttgcgtaaaaataatttggataatggacttttaaaaagctcataatgtatgcaattttagaatagctgacagcatgtgctctaggaaaaccataatcagcaaatttcagaatcaaatcaaatatttgcttactaatgtcttcgtgataaccattttgctttgtaccttctataaaatgttgacgctcactttcaagaacagctctattttttttactcattgctcttcttaaaatatccgcttcaccataactgaagtttgcaaaagtgctcgctatttgcataatttgttcttgataaataataacaccgtaagtattttttaatataggttctaaatggggatgtaaatattgaactttgcttggatcatgtcttcttgtaatgtaagttggaatttcttccattggacctggtctatacaaagaagttacagcaacaatatcctcaaagtgttccggctttaatttttttaatacacttcttacaccgtcagactctaattgaaatatgccagtcgtatctccttgcgacaacaattcaaacactttttgatcatcaaatggaattttttcaatatcaatattaatacctaaatcttttttgacttgagtcaaaatttgatggataattgataaatttcgtaaccctagaaaatctatttttaataaaccaatacgttcggcttcagtcattgtccattgcgttaataatcctgtatcccctttcgttaaaggggcatattcatataatggatggtcattaataataattcctgccgcatgtgtagatgtatgtcttggtaaaccttctaactttttacaaatactgaaccagcgttcatgtcgatggtttcgatgtacaaactttttaaaatcgtcaatttgatatgcttcatcaagtgtaattcctaatttatgtgggattaaacttgaaatttcatttaatgtaacttcatcaaaccccataattcgtccaacatctctagcaaccgctcttgcaagcagatgaccgaaagtcacaattccagatacatgtagctcgccatatttttcttggacgtactgaatgaccttttctcggtgtgtatcttcaaagtcaatatctatatcaggcattgttacacgttctgggtttaaaaaacgttcaaataatagattgaatttaatcggatcaatcgttgtaattcccaataaataactgaccagagaccctgcagatgaaccacgacctggtcctaccatcacatcattcgttttcgcataatggattaaatcacttactattaagaaataatcttcaaaacccatattagtaataactttatactcatatttcaatcgctctaaatagacgtcataattaagttctaattttttcaattgtgtaactaagacacgccacaaatattttttagctgattcatcattaggtgtctgatattgaggaagtagagattgatgatattttaattctgcattacacttttgagctatcctgtcagcttgtgtgaaatattctggattcacatcaagttggtgaatttcattttcagttaaaaaatgcgcaccaaaatcttcttgatcatgtattaagtctaattttgtattatctcttatcgctgcgagtgcagaaattgtatctgcatcatgtcgtgtttgataacatacatcttgaatccatacgtgctttataccctgaactaaaacacttcgatgatctaaatacgtatcttcatgcgaatcaaaaactcgaacaatgtcacgatgttcgtctgcaacatttttaaaaatgataatcatattgttagaaaaccgttttaataattcaaaagacacatgttctaatgcattcatttttatttccgatgatagttgatataaatccttcagaccataattatcttttgctaaaacaacggtttcaatattgtttaatccatttgtcacgtatattgtcataccaaaaatcggctttatattattggcaatacatgtatcataaaatttaggaaaaccatacaatacattggtgtcagttatggcaagtgcatcaacattttcagacacagcaagtcttacggcatcttctatttttaagcttgaatttaacaaatcataagccgtatgaatatttaaatatgccaccatgattgaatggcccctttctattagttaagtttcgtgcgtaaagctttagcaagttgctcaaattcatcccagctgttcactgaaactcctgacgcattcggatgaccaccgccaccaaaatcttgcgcaatatcattaataatcaattgccctttagagcgtaagcgacatcttatttcactaccctcatcaactgcaaacacccatattttcaaacctttgatgtcagcaattgtattaacaaactgagatgcttcatttggctgaataccgaattgctccaatacatcttcagttattttaacttggcaaaatccgtcatccataagttcgaaatgttgtaaaacataaccttgaaacggcaacatttttggatccttttccatcattttatttaaaagcgcattatgatcaatatcatgcccaattaactttccagcaatttccatagtatgttctgaggtattgttaaaaaggaatcgcccagtatcaccgacgataccaaggtataaaacactcgcgatatctttattaacaattgcttcatcattaaaatgtgagattaaatcgtaaatgatttcacttgtagatgacgcgttcgtattaactagattaatatcaccatactgatcaactgcaggatgatgatctattttaataagtttacgacctgtactataacgttcatcgtcaattcgtggagcattggcagtatcacatactattacaagcgcatcttgatatgttttatcatcaatgttatctaactctccaataaaacttaatgatgattccgcttcacccactgcaaaaacttgcttttgcggaaatttctgctgaatatagtattttaaaccaagttgtgaaccatatgcatcaggatctggtctaacatgtctgtgtataataattgtatcgttgtcttcgatacatttcataatttcattcatcgtactaatcattttcattctcccttttttagaaaaattgcttaatttaagcattagtctatatcaaaatatctaaattataaaaattgttctaccatattaaactatttgcccgatttaattatttagatatatattttttcatactaattagttcaggggccccaacacagaaggtgacgtaatgtcagcttactataatgtgcaagttggggtggggccccaacacagagaatttcaaaaagaaattctacagacaatgcaagttgggctccaacatttgtgtgaaatctatcgtatgcctattttctctgctaagttcctatacttcgtcaaacatttggcatatcacgagagcgctcgctactttgtcgttttgactatgcatgttcacttctattttggcgaagtttcttccgacgtctagtatgccaaagcgcactgttatatgtgattcaataggtactgttttaatatacacgatatttaagttctctatcataacattaccttttttaaatttacgcatttcatattgtattgtttcttctataatacttacaaatgctgctttacttactgttccgtagtgattgattaacagtggtgaaacttctactgtaattccatcttgattcattgttatatatttggcgatttgatcgttaattgtttcacccatttgaggttgtcttcctaaaagttgcatagacttcaaaacatcttgtctattaatcacacccactgtctttttattactcgaaacgacaggaatcaattcaataccttcccaaatcatcatatgcgcacaacttgctactgtactcatagcatttacataaataggatttcgcgtcatcactttatctatttcgtcgtcgtccttcgtattaatcatctctcgacttgttacaatacctactaatttataagactcattgactaccggaaatcttgtatggccagtttgattcgccatacgcttataatctgctattttcatcgtatcaaacagcacagataaatcatctaatggcgtcattatatcttgaactattaagatatcttttcgtattttctgattaaaaagtgctttgttgataatatttgcaactaggaatgtatcataacttgatgatagaacaggtaaatcatgttcattcgcaaaatcaataactttattagatggcttaaatccaccagtaattaatatagccgtgcctctttttaaagcttcaatctgcacatcttcgcgatttccgacaatcaataatgtctttggcccaatatactttaaaatatctttgagttccattgctccaattgcaaatttagataccatcttagtgatacctttgttgccacctaacacttggccatcaataatattgacaatttcattaaaagttaaatgttcaatttcattacgattacgtttttcgattcgaaccgtaccaacacgatctatcgttgcgaccatgcccattttatcagcatctttaattgcacgatatgctgtcccttcagatacgtttaaaaatttagcgattttacgcaccgaaattttagagcctatagataacgattcaatataatctaaaatttgttcatgttttgtcattctttacctcttcttttcgaacagtattaactacattataactttattttggataaaaagcattgaagtgaaatgaaataatgatcgtttcacctattttattttttgaaaatatacaacaaacacaaagatcacaaaatctttaattttaaatggaaaaatccattattatttattagaatgtaagtgaggagggatgtactaatgtataaaaatatattacttggtgtagacactcagttaaaaaatgaaaaagcactaaaagaagtgtctaaattagctggcgaaggtacagtcgtaacagttttaaacgcaatcagcgaacaagatgctcaagcatcaattaaagcaggtgttcatttaaacaaacttactgaagaacgaagcaagcgattggaaaaaacacgcaaagctttagaagattatggtattgattatgaccaaataattgttcgtggtaatgcaaaagaagaactattaaaacatgctaatagcggtaaatacgaaattgttgttttaagtaaccgtaaagcagaagacaaaaagaaatttgtacttggaagtgtcagccacaaagtagcaaaacgtgcgactatccctgtattaatcgttaaataaaatttttatccagaatcacaaataatctttcaatcatgatgcagtctcaaacgactgagtaaacacaagaaatgattatgactgtggttctggattttttatatcgtagtaaatttataatcaatgtctaattgtataaaactaaaattacgagagtaggtcagaaatgataaagaaccactgatgtctcccccgtccacgtcgcaactgaatcagtagaatataaaaacacccattaaaaatatgcagacgataacttccacatagattagcgaggtgttttttagtgtaaaatctatattctatttaaaactgaacagattcacctggttttaaaatttgcacgtcccctacattaacagcatctttaaattgttgtggatcttgttcgattaatgggaatgtatcataatgaatcggtacagaaatttttggtttaataaattcattaatagcataacttgcatcatcaatacccatcgtaaaattatctccaattggtacaaaacatacatcaactggatgacgtttcgcaataagtgacatgtcactaaacagacctgtatcaccagtatgataaattgtttttccttcaacttcaaacacgatacccattggcatacctaaataaactggaataccattttcatgtgtaaaacttgaactatgaaatgcttgaacaaatttaacgcttccgaaatcaaagtttgctttaccaccaatattcataccatgaacattttcaacaccgtgatatgaagaaagatagtcagccatttctgcacttccaattactgttgcttctgttttctttgctagttctacaacatcaccaaaatgatcaaaatgaccgtgcgttaaaacgatatagtctacctgcactgtttcaatattcaaatcacacttagggttatttgaaataaacggatctacgataacctttttgttgttcccttctaaataaatcgttgattgaccgtgaaatgataacttcatttgagcatcctcctatcaattgctatataaatttagtacccttttgcctcttaattataacaaattctcaaattttaaaaattgaaaatctagttaatgtattagctcgattttgaaatctaataataattagcataaaatgtaagtaatattatgttgaggagtgtttataaaatgacaaaaatatcaaaaataatagacgaactgaacaatcaacaagctgatgcagcatggattacaacaccgttgaatgtatattattttactggataccgtagcgaaccccatgaaagattatttgcattattgattaagaaagatggtaaacaagtactattttgtccaaaaatggaagtcgaagaagtcaaagcatcacctttcacaggtgaaatcgttggatatttagacactgaaaatcctttttcactttatcctcaaacaatcaataaattactaattgaaagcgagcacttaacagtagcacgccaaaaacaattaatctctggtttcaatgtcaattcattcggagatgttgatttaacaatcaaacaattgagaaatattaaatctgaagatgaaattaacaaaatacgtaaagctgctgagttagcagataagtgtatcgaaataggtgtttcttatttaaaagaaagtgtaactgaacgtgaagtagtcaaccatattgagcaaacaatcaaacaatatggcgtcaatgaaatgagttttgatacgatggttttatttggagatcatgccgcatcacctcatggcacaccaggagatcgcagattaaaaagcaatgagtatgtactatttgatttaggtgtaatttatgagcattattgtagcgatatgacacgtaccattaaatttggtgaacctagccaagaagcacaagaaatttataatattgtattagaagcagaaacatctgcaatccaagcaattaaacctggaatacctttaaaagatatcgatcatatcgctagaaatattatttcagaaaaaggttatggtgaatatttccctcatcgcttaggtcatggtctaggattacaggaacatgaatatcaagatgtttcaagtactaattctaatttgttagaagctggcatggtcattacaatcgaaccaggtatttatgtaccaggtgttgcaggtgtaagaattgaagatgacatacttgtcactaatgaaggatacgaagtattaacacattacgaaaaataagagtgggacaaaaatgaaaagcttgttactagcgcattctcattcagtcaaacactgccaatataacattgtagcgcctaggacataaatttttgtccaagtctaaatgcaatatgtaacaaacaagctagaaacacatatgcaggtatgttcatcagtaacatgtaatgaatcaatatcattcatgttcgatgatttcttcgcattgtttctagctttaatttatcattatttaattttaataaccaaggagatgataacgtcattctttaatacgctgtaattcattcccttttcatcaaatttaaattataagtgtaatgcttcttctacagatttatattccatttcaaatgcctctgcaacgcctttattggttacgtgacctttgtaagtatttaaacctaatgataatggttgatttgatttaaatgcttctctataccctttattagctagcatgagtgcataaggtagcgtagcattatttaaagctaacgtcgaagtacgcggtactgcacccggcatatttgcaactgcataatgaaccacaccatgtttgatatatgtaggatcatcatgtgtcgtaattttatcagttgtttcaaaaataccgccttgatcaatagcaatgtcaataataactgacccatttttcatttgtttaatcatgtcttctgttacaagtcttggcgctttagcacctggaattaaaactgcacctattactaaatcactttgtttaacatacaactcaatattcaacggatttgacataattgtatgtacacgtccaccgaataaatcatctaattgttgtaaacgctttggattaacatctaaaatcgtaacatctgcacctagtcctagtgcaattttagctgcatttgttcctgcttgaccaccaccgataatagttactttacctttaggtactcctggaacgccacctagtagaattcccataccaccattaagtttttgtaggaactctgcgccaacttgagctgacattcttcctgctacctcactcattggtgataataatggtaaagatcggtctggtaactgcacagtctcatatgcaatactaattacttttctatctatcaaagcttgtgttaatttttcttcattcgctagatgaagataagtaaataatactagtccttctttaaaatatggatattctgattcaagaggttctttaactttaataaccatatccacatcccaaacttttgcttgttcagcaacaatctcagcacctgcttctttgtaatctacatcttcaaagaacgatcctgaacccgcatttgtttccactaaaacagtatgtccactttctactaaagcgtgcacaccacttggtgataaaccaacacgattttcattatttttaatctcccttggtataccaattttcataccatccacctccataatcatcttaacgcgaacattttgaaagcgcaatcaaaaatccacaaaattgtaaaggttattacactgacttttccgaaaattgtggtaaaataaaattaagaaagaacaaggaggcacttactatgattacttacaaaaatattttaatcgcagttgacggttcacatgaagcggaatgggcatttaacagagcagttggtgttgctaaacgtaacgatgcgaagttaacaattgtgaatgtaattgattcaagaacgtattcttcttatgaagtttatgatgctcaatttactgaaaaatctaagcattttgcagaagaattattaaatggttataaagaagtagctactaacgctggtgttaaagatgtagaaacgcgtctagagtttggctctcctaaatctatcattcctaaaaagcttgcacatgaaattaatgcagacttgattatgagtggtacatcaggcttaaatgccgtggaaagatttattgttggttctgtatcagaatctatcgttcgtcatgctccatgtgacgtgttagttgttcgtactgaagagttaccagcagacttccaaccacaagttgcaacaactcaattacgtgaaaaatatcaaaattaaatatagatgatcattagataactacttgatcattatgaaccaagtgcaactttctgcacttggttttttattgtttataaataaaactcacttaataatgttgtcataatcttcttcgactacttaatttttttaagatattcgtgaaaaaagacattacactagttaattttcaaacaatacaaaaagcgtctacctcctacttataattgtagcggagatagacgcttaatatttattaaaaaattattttagaccaccgtatgtcataacatcacgagcaatcatactttcttcgtctgtcggtataacgacaactttaacaggtgaatgcggatagttaataaatccttctttaccacgttgtaagttttcatttttcttaggatcccagtaaacgcccataaattctaaaccttcaagaacttttgcacgaatttccactgaattttcaccaatacctgcagtaaatacgattacatcaacaccatgcattctcgcagcatatgatccaatatatttgtgaattttagaagcaaatacatctaaagccatttgtgaacgtgctttacctgattcagcttcttctgataagtcacgtaaatcactagatgtacctgataatcctaataaacctgattctttgtttaaaatttccaatacttgttcagcagttttgccagttttttccataataaatggaattaaagcagggtcaatattaccagaacgagtacccattgttacaccagcaagtggtgtgaagcccattgatgtatcaatagatttaccgccatcgatagctgcaattgatgcaccgttaccaatatgacaagaaataatgcgtaaatcttcaattggtttatctaacatttctgccgctctttgtgacacaaatttatgacttgtaccatggaagccatacttacgaataccgtaatctttataataatgatatggcaagctatatagatatgctttttcaggcattgtttgatggaatgctgtatcaaaaatcgccacatgagggatattcggtaataatttacggaaagcacgaatacccatcaagttagctgggttgtgaagcggtgctaattcgcttaattcttcaatttctttttcaacttcatcagtaattgctgctgattcagggaatttttcaccaccatgtacaacacggtgaccagttccatcgatatcgttaatatcattaatgatattatgttttttaaatgcgtctaacatgatatcaactgcttcaacatgatccttgatatcttgtactgttttaactttttccccgtctacttcaattgtaaaaatagaatcttttaatccgattctttctactaatccttttgttactaattcctcttcaggcattctgattaattgaaactttaatgatgaactaccagcgttgatagccaagattaattttgacataagtaatgatcctccatcgtttgctttttatactatttcattttcattttatcattcatacagttttatgactatactattacagattattttttaggacgatttgtgtccatccactgatttaactctgtcataaatccttgaaattgtgaaggatttttgaaatcaggaatatttgccaataatacttcaactggctttgtttcacccgattttttcttttgtaaaattaatatagattttcgcgctttttcatttttaaataaagttggtggtaaatttaaaaatgcttgcatttctgtctctgttgcaatatatttttcaagctgttttacatgttcacctgtaaaaatattacttggtaccactagaaaggcatatccagtatcttttaatgcatttattgcttgttctattaataaataatgtgaataactatgtccttcttcgaaacctagcttaaagtccctgcttctttcatcaattggataatagcctactggaaaatcaccaataacgatatctgcttcttctaacggtagtggcataatggcatcttgaggatacacatcgaaaggaatttctaagaagtttgctaaatgtacactaacacgtgataaaactggatcaacttcaattaaatgatgcataaccgcaatttcaggtaacacttcttttacagtagcacttaaatgaccggtaccacttgcaatatcaacaatatgtaattcttcttgattgttcataaatcgctcaactaaaaatcctaatatcaatccaattgaatctggtgtaatttgatgatttgcttgtatcttttcttcctgcattaaacttaaatatgcaaattggaatgctttacgtcgatcttgtaacgtcgattgttctaacaatcctcgttcatttgtataaacttgttccattgctagcccaagattttcaataaaactttggccattttcattatttaatgttttagctttttcatctaatgaatgaaacaagcgttccataattgtttgttgttctgccatattcgtccctctccaataaaaagtgcccataggtcttagcaatcatagaaaacaattctattttaatgctgttgacaacgatggacacgatgtatacattttaagatttatctctttaatgattaaatatttttgtatgcagctaaagcagcatcaaaatctgggaaatcagtaccttcactaacgatttctttataaacaactttattatctgcatctaatacaaatactgcacgagctaataagcgaagttcttccataacaacgccatagttttcaccaaatgataagtcacggtggtcacttaatgtaatgacattgtctaaacctgctgaagcgcaccatcttttttgtgcgaatggtaagtctgctgagattgtaagcacaatcccctcttctttagaagcttcagagttgaatttgcgagtctgctgatcacaaacacctgtatcaattgatggtaccacactaattaatttctttttaccagcataatctgctaatgttacttgatttaagtcattatctaacactgtaaaatcaggtgcaaaatcaccttcattaatttgttgaccttttaagtggattggtccacctttgaatgttatttcagtcatatacttgacctcctgcattttaaaattctaactacatcatacgacaatttatggtttgattacaattttcatgctttaatcaaaagcgaatttaattttatacaaattgttgaatataatcaaaagcattttttaaaattaaaatcgcagtaataataataaataatactttcacatagccaacaccttgtttgatagcaaaatgagccccagcatatgaccctacaatcatactcgcagccataactaaacctattacataatctacttgtcctaataccataaataatacaagcgcacctatattagaagcaaaattcaaaactttagcatttcctgcagcgcttaaaaaatcaaaaccaaagattaacaatacaaaaagcataaatgaacctgttcctccacctacaaatccatcataaaagccgattaaaataaaaagtgctgcaaatagtacggctttcttaaatgtaaattgagtaaacgtacgtgtattgccccaatcttttttaagtaatgtgaatataaacaccgacgaaagtgcaataatgattaaaggtttcaatatttgtgacggaaccatggttgcaatatatgcgccacatgcagatgccaaaaatacaaaaccaaataatttggcaacaacatataagtccactttaccggaccttataaactttatcgcactagttaaagaaccaaatgaacttgccaatttatttgtacctaaagccacagatggtggtagaccgattgctaataatgctggcgtagaaattaaaccaccaccccctacaaccgaatctataaacgccgcgataaaaccaaataaaattatgattataatcatcgttaaattcaaatccatagtttaacatccccttatgtttaaattcactctaagattttatttataaaaagtcgtttattaattggtttgtttgctgttctttaatagttttataatcactagttatttcaagtgtttcaatattttcaacagcacgattaatcatctcttcaaaatcaaagacactttcatattgaactaccttatcaaagtttggttcggttactggatttttaggggtgaaaattgtgcaacaatcttcaaaaggttgaatagatgtttcaaatgtaccaatttctttcgatttaataataatttcttctttatcgtaagttaataaaggacgtaatacaggggtagaagttacattattaattgcatacatactatgaagtgtttgactggcaacttgacctagattttcaccattaacgatggcataagcgcctatttgatgtactaatttatcagcaacacgcatcatcatacgtctcgttgaagtcattgtatatcttggatgtacaactttatttacctgtttttgcaattctgtaaatggtacaatatgcaatttaattggtccaacacgttcagctaaaatacgtgtcaattcaataactttttcttttgcttgatcacttgtaaatggtggactatggaaatgaatcgcttcaattgttacgccacgtctcatcacttccatcccagcaactggtgagtctataccgcctgaaagcattagtaacgtcttaccaccagtaccaactggtaatccacctgaacccggaacaacttcttcatacatataaattgcatctaatctaacttccactcgaatttcatgatctggacgtttgacattaacagaaacattttcaatttgtttcaatacggtaccacccaattcacgttgtaattcatacgtatccattgggaaatttttatcggcacgcttcacatcaattttaaaagtgctgttttcttcaaattgctgcgcaaatttaattgtcgctgcactcattgcctctattgatttttctacttttaatactggactaatagatttaataccgaaaatttttgataatcgatttgttatttcatttatatctgcatggtcttcaagttcaatatacatacgatctcgtttgcctttaacgacaaatccatcaagtccttttaatgacttatttacattatttcttaattgatttacaaatttttttctatttgaaccctttaatgttaactccccgtatctaacaagcaagtgatcatacttcattattttagcaactccttaatttcctcataaatgatgataaatatttctttaaacctcgctatatcttctttagttgtagtagctccaaatgataatcttatactaccttcaatagatttgtctgataatcccattgcagccaatacttcatttaatttattacgtttagatgaacaagcactcgtcgtagatatcataatgtcatattttgaaaaagcattaactaatacttcaccttttacgccaggaaaactaatatttaaaacgaatggtgaacctgaagttgatgaattaatataaacaccttgatattggcttaaaaattgacggacgtcattatttaactcagtaacaaatgcattcaatgcttcaaggttttcattagccattttcatcgctttaaccatagcaatatcattgggtaaattgactgtaccacttctaacaccatactcttgaccgccaccttgaatgattggctcaatattttgaatatgattaacaagtaagacgccttgaccttttaacccattaaatttgtggccacttaaactaatactatctacgttattgaaatccattgaaattttgccgaatgcttgaaccgcatctacatgaaaatgtgccttaggataattttttataacttcagccatttgtggaatgggttgaatttgacctgttacattatttacatacatacatgttactaaaccgactttatcggacattaaatcgttaaaatgttgcaaatcaatcgtgccatcttttgttacatcaacatatttaactttaaagccttcgcgctcttccaaatatctgacaacttctaaaacagacggatgttctaaaacagatgtaattatttctcttgctgtatcaaatttacgataagccacacctttaagcgcgatattgttagattccgttgcaccactagtgaaaacaacatcatatgtcatattagtattgaccatatcatttatttgaacttttgcttgctgtaataattgatctgcttgcaaaccagctttatgcggactattcggattataatacattgattgatttacttttaaataagtatctaacacttcttcaaatgctttcgtcgttgccgcattatctagatatatcaaaataaacacttctctttcattaatcatcaatcttttaaaattgtttttactcaagcattatactattatcacataaaaaataaaggctataacaaaaattaatcatttttccacccattttaataagaattgaactatttcactcaatgcatagcacgatgcttttttcactacttatattaatttaaacttcacatttgattacgtttatctttaaacaattgctatttatatttattgtccctttcatatatccatataaaaaaagaagctagacaacgtatcgttggctaacttcaattattaaactcatcagtccaatttgacagagagctcatattatttaagtataactacatactattttctattgcttaataacttcttcttcaatatgtttagtgacacctggctcaacactttcaagagcttgctctgcaatttcaatcgcacgcttatagcgattatttttaaataatcgttcagcttcatttaagctcttatcaacattgctatagtccttacgatatctatttccatattgaattaatttctctgcataaacagcattaacaagaacatcatttgcttcatcttcaaatgtattcatttgaatcacaattttagacactttatcttttaactgtttaacgtgtattggacgttcactaaattgttcgttaacatcacgaacttcatgatcaatttcatttttcatgatgataaacctttcaggaacgcttgttaagttagaagcaagtaatcgacgatacacttcttctttcttcgattgtactcgtaacagattgtcttctgcttctgcttcatcttcacgcaattgaatcagatgattttgtagcttttcttgtttgtcattaataactgtgacatgatcttctaaatattgtaaattatcctgaacctcgctatatcgtacagcagatttagacatttcttttaaaatatcatcatatacagaaattaaactttgaatttcattttcaaattgacgaacactctgagcatcagattcatttatatagtagttttcacgtacatattcaatttctgtttgcaatgtataattcatgtcttttgctttgaataagttatccgtaatgatatcttttgtttcttcgacatcatttttagctttaacttcatgttcaattaaatcatacatgtcatctaacttatcattgatattagctagtttatcattagcttcttctaattctaagcgactaattaatggttcaacgaaactaagctctgtttttaagctttgtaatgtactgtctacttttacgtgatccagatcatacccttcaactttaagatcacggcaaccatattttaaatcttggaattgaccaggtaattctttttgagtttctctaattaattctggtatttcttccatataagatcttagctgtttcatttgttcattcaaggcagctatatggttgtgcgcttgtacataattaccatcagcttttagtacttcatattgctctaaccttggctcgaatttttcaatttcagtttcaagaagacttgctgcctcaccaaattgatgacgatttgctaaaacatcacgtttcatttcacgataatcaaccttacatttgtcatataattcatcattatctttgtataacgcaataatttcatttacatcttctaattgttgctgatagctttgttcgtaactatccatcaactcatttgcatcatcaatttcacattgagatgcgttgaaactaaatttatctaataaagcctcagcattatggattttttcttccacaggagctagatacttatttgtactttctacgttgtcctttttcattgcatcgtatttcgtttttgtttcaccttttaaattcaacttagataattgtgcaaggttttgatcaaaaggtaacgtttcaatttcatttttacgttcgattgctttttctattatttgtcttttatttgaacgtaaatagaataatacacctacagcaatcaatataatcacaattattgccaaaatgatatataacaccatatgcttctcctcctaatttatcattactattataacgtaattttgcttaaggataaattataaaatgaatttattgccataatattttcgaaattctatactattataaaatctatgaaaataagaggttttaaatatgacaacaattaacccaacaaactacacattattaaagaaacaagcagcaagccttattgaagatgaacatcacatgattgctattttaagtaacatgtctgccttattaaatgataatctagatcaaattaattgggtcggcttttacttattggaacaaaatgaacttatacttggacctttccaaggacaccccgcttgtgtccacattccaattggaaaaggtgtatgtggtacagccgtttcagaacgtcgtacacaagttgtagctgatgttcatcaattcaaaggacatatcgcttgtgatgctaatagtaagtctgaaattgtcgttccaatttttaaagatgataaaattatcggtgtcttagatatcgatgcccctataacggatcgatttgatgacaatgacaaggaacatcttgaagcaattgttaaaattattgaaaagcaactcgcataaaaggacatcagcattttcaataaagtgttgacagttagcaggaaaatgttacaataaaatttgtgtgaattaacgaaagtagcagttgtatattattgagcgctatgttgttcccaatgcggacgtgtcacgtaactgtcgctataaggtgaagacacataaaacaatatatcttagtaagcatgcaacactcttttttgtttattcataacaacaaaaaagaattaaaggaggagtcttattatggctcgattcagaggttcaaactggaaaaaatctcgtcgtttaggtatctctttaagcggtactggtaaagaattagaaaaacgtccttacgcaccaggacaacatggtccaaaccaacgtaaaaaattatcagaatatggtttacaattacgtgaaaaacaaaaattacgttacttatatggaatgactgaaagacaattccgtaacacatttgacatcgctggtaaaaaattcggtgtacacggtgaaaacttcatgatcttattagcaagtcgtttagacgctgttgtttattcattaggtttagctcgtactcgtcgtcaagcacgtcaattagttaaccacggtcatatcttagtagatggtaaacgtgttgatattccatcttattctgttaaacctagtcaaacaatttcagttcgtgaaaaatctcaaaaattaaacatcatcgttgaatcagttgaaatcaacaatttcgtacctgagtacttaaactttgatgctgacagcttaactggtactttcgtacgtttaccagaacgtagcgaattacctgctgaaattaacgaacaattaatcgttgagtactactcaagataataccgttcaatacaaacacccacaattgtgggtgttttttttattaatttaaaaatgatagattcaagattatatcgagctaccctattttacaattaacttagaatttacaagtcttatttgttgaattatctacaaatttcatcatttctttttaaaaatatcaattgcgatatacgaatccttatccctctatcaaataaccattcatcgtcttacttaataaataatttcggatcatctgtaattaatccatctacacctatttgtcttaatttttctccagttttcaatttattaactgtgtatggcataacctgtaattgatgatgatgtgcttcatcaacaaattttctggtcactaatgcataattaggattaacataactagcaatttgagcaattcttgaaaagtttggctttttataccaatacttacgtttactacaaagcacacctaattcatatatactgcctaatgtgtttaacttttcgatgcattcgatatcaaaagattgtataactacttgtgtcgcatcgactttcttttcttccaaaaatgccagcaatttacattctattcctggatataaattcggacttttcaattcaatcaatagctttttatcaaactttaagcataatgaaagtacttcatctaacgtgggtattcgttctcccttaaaagcaacatctttataactaccaaaatcaaatgattttaattgcgataatgtgtaatcagcaatacgccccttaccatccgatgttctatcaattgtttcatcatgtatcacaacaaaatgttggtctttggtcaaatgaacatctatttctaacatagcaacattgagccccattacctctcgataaccgaccattgtattttcaggaaaatcactcggcaatccacgatgcgaaacaatttgtaattcatctttcagtttattcagagtcattaataagtcacctttctgttaaactttgataaactattctaaaattaaactatcacaattatattggaggttaaagcaattgcatcaacatgactttaaagtcaaaacttcttggcaaggtggtcgtaacaatgtcggaaacgttcaaggcgacatactttcagagaatatttcaatacctgcttctttaggtggtgttggtataggaacaaatcccgatgaaatgttagtatcagccgcgtcatcatgttatatcatctcattagcagctactcttgaacgtgcaaagttcacagatatttcaattgaacaacaatcgattggaacagcttgtttaaataatggaaaattcagtatgtcaaaaattgtgcaccatcctcacattcaaattccaagtgatcaaatagcacaattagaaaagcgattaccaaaattgataacaattgcagataataattgcatgatttcaaatgctgtaagaaataatgtggacataaaaatctatcccatcattcaggccaaataaaatcgttaagtgataacatttgttcgacaatatagcgttatcactttttttaggcttttaaattttcagaaaatttgctaaaatagtgaaatcttatttataggaggcatataaatgtattatcatcaaccgttgttattaacacctggcccaacccctgttcctgatgccattatgagagaaattcaagcacctatggttggtcatcgttctaaagattttgaagacatcgctcaacaagcatttcaaggtctaaagccaatatttgggagtcaaaatgatgtacttatattaacatctagcggtacaagcgtcttagaagctagtatgttgaacattgtaaaccctgaagatcacttcgttgtcattgtttcaggtgcctttggtaaccgatttaaacaaattgcacaaacttattacaaaaatgtacatatttatgacgtaacatggggagaagctgtagatgtcaaagatttcatcaattacctttcaactttaaatgttgaagttaaagcagtatttagtcaatattgcgaaacatctacgacagtgctacaccctattcacgagttaggaaatgccatcaatcaatttaatagtaatatttattttgtagttgacggcgtaagttgcattggtgctgttgatgttgacattaacaaagataaaattgatgtacttgtttctggtagtcaaaaagcaattatgttacctccaggattagcttttgtagcttatagccaccgtgcaaaagaacgtttcaaagaagtaactacaccaaaattttatctagacttaaataaatacatttcgtcacaagctgacaattctacaccgttcacaccaaatgtgtctttatttagaggtgtaaatgcatacgttgaaaccgtaaaagcagaaggtttcaatcacgtaatagcacgacactatgcaattagaaatgcattaagaagcgccttaaaggcattagatttaactttattagtcaatgataaagatgcatctccaacggttacggcattcaaacctaacacaaatgatgaagtgaaaataatcaaagatgaacttaaaaatcgctttaaaataacaattgctggtggtcaaggccatcttaaaggtcaaattttaagaattggtcatatggggaaaattagtcctttcgatattttatcggtagtatctgctttagaaattattttaactgaacaccgtaaagttaactatatcggtaaaggcatatcaaaatatatggaggttattcatgaagcaatttaatgtactcgttgcagatcccatatcaaaagatggtatcaaagcattattagatcacgaacaattcaatgtagatattcaaactggtttgtccgaagaagcattaatcaaaattataccttcataccatgctttaatcgttcgtagtcaaactacagttactgaaaatatcataaatgctgctgattctttaaaagtaatcgcacgcgccggtgttggtgtagataatattaatattgatgctgcaacattaaaaggtattttagttattaatgccccagatggtaatacgatttcagctactgaacattcactagcaatgttattatcaatggctcgaaatattccgcaagcacaccaatcacttacaaataaagaatggaatcgaaatgcatttaaaggtactgagctttatcataaaacattaggtgtcattggtgctggtagaattggtttaggtgttgctaaacgtgcacaaagcttcggtatgaaaatactagcttttgacccttacttaacggatgaaaaagcaaaatctttaagcattacgaaggcaacagttgatgagattgcccaacattctgatttcgttacattgcatacaccactaacacctaaaacaaaaggcttaattaatgctgacttttttgccaaagcaaaacctagtttgcaaataatcaatgtggcacgtggtggtattattgatgaaaaggcactaataaaagcattagacgaaggacaaattagtcgagcagctatcgatgtgtttgaacatgaacctgcaactgattcgcctcttgttgcacatgataaaattattgttacacctcatttgggtgcttcaacagtcgaagctcaagaaaaagtggcaatttctgtttcaaatgaaatcatcgaaattttaattgatggtactgtaacgcatgcagtgaatgcacctaaaatggacttaagcaatatagatgatactgtaaaatcattcatcaatttaagccaaacagttggtgaattagctattcaattaatgtacaatgcaccaagctctattaaaattacctacggtggcgacttagcctctattgatagtagtttattaacacgtacaattattactcatattttaaaagatgatcttggtcctgaagtcaatattatcaatgctctaatgttgttaaatcaacaacaagtgacattaaatattgaaaataataaagcagagacaggttttagtaactacttagaggtagaattatcaaacgatagcgattccgttaaagttggtgcttctgtctttacaggtttcggtccaagaattgttagaattaataatttttctgtagacttaaagccaaatcaatatcaaattgtgtcatatcataatgatacaccaggcatggtaggtaaaactggcgcattgttaggtaaatacaatatcaacattgcatctatgactttaggtagaactgaagcgggcggagatgcgctaatgattttatccgttgatcaacctgtttcaaacaatataattgatgaacttaaacaagttggtgaatacaatcaaattttcacaactgaattgacggtacagtcataaacaatttatataaattcaaaatgccaagaagacattggattacttccattgcttcttggcatttttttaatattaatttcattgtaactcaatatgaaacctttggttcaatcattcacttcaagttatgctgtcaaacaacaatcaaattacaaattatctagtacacctctaagttcacctaaatgattaataacatagtcggcatgatgcgcttctaactcacctgcagcatcctttccttttaaacctgataatgttccaataaacgttgcacctattttttgagcacttaataagtcagctaacgaatcgcctactataaatacgtcatctttatttacaatgttatcttgcttattgatataagattcatatttatcgcgtttattaccatttaaagctgcgatataactaaaaggattcggctttcctaatggtcgtgcttgcggatacatattctctgcttctaaaacatcacttgctgttgcaataaaatcagcttcaaaatacggtaacaatcctaaattttcaaatggcacaacagtctcagtataaggacgacctgttgctatacctaattcgaaaccagcaccttttaaatcattcagaagtaccttaacttcatctaccggtctcaaaataatttcttgataaatataacctgtcttaaaagtagttcgtgctattttcttttcaacctcttcatacaacttcgatcctaaataccattcttgataaacttcttgcgctaacgtccataatgcacccttcaaactaaataaattagcatccgaaacatgtaactctgttgttgcaaactcttccaaagcagcataaatattatttttaccaacttttacattatccaaaaattgtaaaggtagttgttcatttaaattaaaacggtctgctatgtttgtgcttatattttgcaacttcaattcgacaggctcatctcgatacatgaatgcctcaatttcatcatgtgataactttttcaaaatatcaattaaatgaatactaaaaacgataaataacatatcccaatttgaattcagccctagcgattttaatttgtttaaaatcttatctttttgaaaaattcgattcctaatgtcttgtatatcgttatcagtcaaagtttcccaatctatatgtgaatgaagacctaaataacacttatccattaataattcatataccgttaatgcagagacatcgaaacaacgttcttcacttaaaaaaacgccatcaacatcaaataaaattttcttcacaatccccactccatttctgaaaattcagatataaatcattctactatttgactaaaaaaagcgcaaaccctattgagttggatttgcgctttagctgtctaaattttataaatgtttttcaatttcatcagcaacctgctgaacgtgtgtaccaacaataacttgagttgaatgtttgccattaacagtaacaccaactgcaccggcgtttttaatcttctgttgatcaataatagatgtgtcttttaactctagacgtaaccttgttgcacaattggttaaattaacaatattctcttgaccacctaaaccttctaatatttgtatagcatgattatgatatttactttgtttaatatcattttcaccaggagcaatattatcttttacaactgttggatcaactaattcattttcacctctaccaatcgtattcaagttaaatacttggattactacacggaaaatcacatagtataagatgaaaaatacaacaccttgaacaagcaacatcaatggatgatttgataccggattaattagtgataacacataatctatcaaacctgcactaaatgaaaatccagctgtccaatggaatgtagctgcgataaataaagataatcctgttaataacgcatgaacaacatataagattggcgcaacaaacataaatgcaaactcaatcggctctgtaacaccaacgaaaaatgctgcaactgaactcgctaggaaccaaccgtaaacttgttttttctgagtagttttagctgtatgatacattgctaacgcagccgctggaataccgaacatcatgattgggaagaatcctgcttgatagcgtcctgtaataccttttatagcatctttgccactttggaatttaccaatatcattaataccaatcgtatcaaaccagaacacactattcagtgcatgatgtaatcctgtaggaattaataatctgttggcaacaccatatacgaaagccccaaatgatcctaaaccaactatagattcaccaaattttacaatccatgaataaagtagtggccataagaataacaatatgacaactaaaaatgtacagtaaaatgcagtcataattggaactaaacgtttaccactaaaaaatgataatgctaatggtaattctgtttcactaaacttattgtatgcataagctgctattaaacctattacaataccaacaaagacattgccattattcatcttttcaaaagctgaatttatttcagaagctttcattcctaataaaggcgctaatttcattggtgataatacaactgtaactaaaaaatatcctaacgcagctgcaagcgcaactgcaccatcatttttctttgccattcctatagctacaccaattgcaaataaaatacctaattgctctaaaatcgtagtacctaccgtagtaaagaacattgcgattttcggcgccgcatgaagtgcatttaacgtattaccaattccggcaataattgctgcagccggtaaaatggcaactggtaacattaacgaacgccctaaattttggaaaaatttatacattgaatgtcatccttcttaaaataaggtagaaatataaagattactaatgtaactagaataactacttcgatactccgttatagtcacctaggcttactaaccagctatatttctacctcaagttattttataaactttttacaatttcatgcaattcttgttgtaactttgctgttcgtgtttcaatctcttttgtaatgtaatcgatacgctcgtttcgttttaaatctttaggtaaatcgttaatatcgattggtttaccaatatttatgtatgcttgtccagttataagaccatgaatcttagtaggaccaacataagcaacaggtaatattggtgacttacttaacattgcaattgttgaagcaccacgtttcaaaggtgcaccttcttgcgatgtgcgagaacctgttgggaagataccaactgtcttattatctttcaacaaattgattgggcgttttaaagtactaggtcctggattttcacgatctacaggaaatgcatttaaagacgttaaaaatttaccaatccatttatttttgaataattcttttttagccatataatgaatttgattaggatataatgccatacctagcataatgacttcgttataactttcatgcgtacaagttacgacatatttactatccttaggaatattatctttaccgattacgtataatgattttgacattttaactaaaatgaaattcaaaatcttactaatcactgaatacattgtgccacctacttaacttatttgtttataacaactagattttatcactatatttttactagaacaagatagtctgaaaatacatctaaagttgtatagtgtattactagcaataattataaaaaaaagacataattaaagcatatataaatcatataatggaggttaagtatgtcagattttaatcatacagatcattcaacaacaaaccatagccaaacacctagatacagaagacctaaatttccatggtttaaaacagtcatcgttgcattgattgctggaatcattggtgcacttctagtacttggtataggcaaagtattaaatagtacaattttaaataaagatggttcaactgtccagacaacaaataataaaggtggcaatcaattagacggtcaaagcaagaaattcggtaccgttcatgaaatgataaaatctgtctcccctacaattgttggagttattaatatgcaaaaagcatcaagtgtagacgacttattaaaaggcaaatcatctaaaccatctgaagccggtgtaggctcaggtgtcatctatcaaataaacaacaattcagcttatatcgttacaaacaatcatgttattgatggcgcaaatgaaattagagtccaattacataataaaaaacaagttaaagcgaaattagttggtaaagatgcagtaactgatattgctgtacttaaaattgaaaatacaaaaggtattaaagcgattcaattcgccaactcttcaaaagtacaaactggcgatagcgtattcgcaatgggtaacccattaggattacaatttgctaactctgtaacatctggtatcatttcagcaagtgaacgtactattgacgcagagacaactggtggtaatacaaaagtcagcgttcttcaaacagatgctgctattaacccaggtaactcaggtggcgcattagtagatattaatggtaatttagttggtattaactcaatgaaaattgctgcgacacaagttgaaggtattgggtttgctattccaagtaatgaagttaaagtaacaattgaacaacttgtaaaacatggtaaaatagaccgcccttcgattggtattggtttaattaatttgaaagatatacctgaagaagagcgcgagcaacttcatactgatagcgaagacggtatttatgtcgcaaaagctgatagtgatattgatcttaaaaaaggtgatattattacagaaattgatggcaagaaaattaaagatgatgttgatttaagaagctatttatatgaaaataaaaagcctggtgaatcagtcactgttaccgttatccgtgatggtaaaactaaagaagttaaagtgaaattaaaacaacaaaaagaacaaccaaaacgtcaaagccgatcagaacgtcaatcacctggccaaggcgatagagatttctttagataatttatagacagaaaagtacattaagagcctactcatattcattcctaagaatgtaatgattaggctctaatttatttagctatgcaattatatttattgatagttaaccatgaagtattttttcttaccgcgacgaataatcgtaaattcgccatcaattttatcttctggtgctaaagcataattaacatcttgttgtctctcaccattaatataaatcgcaccattgttaacatcttcacgcgcttgccgtttagaaggagaaatgcctgtttcaataaggacttcaacgatatttgttgtgtcatttgataatgtcacttgaggcacatctttaaatccatcttttaattctttcgctgataatgattttaaatcaccactaaataatgcttgtgaaatacggattgcatcatttaatgcatcttcaccatgaataaatttagttacttcttcagctaatgttttttgagcttcacgtaaatgtggtgcttcatttttagattgttctaagcgatcaatttcttcttttcctaagaaagtaaagtattttaagaatttaattacatcttcgtctgattgattaatccagaattgataaaattcataaggactcgtcttttcagcatctaaccaaacagcacctgactcagatttaccaaatttcttaccatctgatttagttacaagcggaatagttaaaccgtatgcgtctgtttgaccatacatacgacgcattaattcaataccacttgtgatattaccccattgatctgatccacctacttgaatcttacaattcaattctctattcaaatgaccgaaatcaatagcttgtaaaatcgtgtatgtgaattctgtatatgaaataccatgttctaaacgactttggattgaatctttacctaacatgtaattaacgccgacgtgtttaccatagtcacgtaaaaagctaattaatgaaatttgtcctaaccagtctctattattaacaagcactgcaccatggtctgttccaaattcaaaaatattatgcatttgcttactaataccttcgatatttttatctacttgttcttctgtttgtagcacacgttcttctgatttacctgatggatcaccaatcatacctgtaccaccgccaattaaaacgataggacgatgtccatgttcttgaaatcttcttaatgttaaaaatggtagtaagtgaccaatgtgtaagctatctgccgttggatcagcaccgcagtataacgtcacttgttctttatttaataaatcttcaataccttgttcatcagtttgttgataaataagacctctccattttaaatcttcaattaatacattcgtcattattatttcctcctatttataattatttagtgaatacttgttaaaatactttaaagctttttgaacgtaaaaaaacccttacaacaaatatgtaagggcgcgattgcacgttaccaccaaacttaaacataatcataagataatgttcactctattaatgatacgttcattaataaacgtaggacatgttagttataaaggtgtattcatattattaaaaacactagttcacagcgaccactagctctctgatgatttcaaataatattacttgtccttttatcctattctttatgcattttccctaattataattaacgttaaaataaaagtcaaattgcttaaatatggtatactatacgtaatttaggaggttaaggatgacgaatcaagacaacaatcatcaattgaatcatcgtatatatcaatttgaaaagatatataaagctatcaaacatgtcattgtttttatatttatgattttcattgccatcgttgctatcgctgtgattgcgatgtctttatattttcatcatttaactaaaacgtccgactcattatcagatgatgctttaataaaaaaagttcgacaaatacctggcgatgaattattagatcataataacaaaaatttgttatatgagtataaccattctcaaaactcactcattataggacctaaaacatcaagtccaaatgtcattaaagcattaacgtcatctgaagacactttattttataaacatgatggcatcttaccaaaggcgattttaagagcaatgatacaagatatttttaatactaatcaaagttcaggtggtagcacaattacacaacaacttgttaaaaatcaagttcttaccaacgaaaaaacatatagtagaaaagcaaatgaacttcgcctagcaattagattagaacacctactctcaaaagatgaaattatatatacgtatttaaatatagttcccttcggtagagattataatggcgctaatatttctggaattgcatccgcttcatatagtttatttggtgttccaccaaaagatttatcaattgcacaatctgcataccttatcggtttgttgcaaagcccatatggctatacaccctacgaaaaagatggaacattaaaatcggataaagatttgaaatatagtattcaaagacaacattatgtattaaagcgtatgttaatcgaagatcaaatcactaaaaaagaatacaacgacgcattaaaatatgatattaaatcacatttgttaaatcgaaaaaagcgttaattgatgctcactcttttaagtaaccacaataatccatccaaatattaaaaacagcagtaagattattttcaattagaaaatttctcactgctgttctttattttaaatactctaaaggaaagctattaaacaaatcaatagtttataatttaattgctttcacattgtctacaaagctaatcatacatatgctatatccagttaattacttagattcttttctgaatttaggaatgaataaagctaacatacctaataacgcatataaaccccaccatgattggcttgaagttgtttctccagtttttggtagcattttagattgactaagtttgttttctttcgatggtgtgccggccttttcttttgttttcactgttttgtctacagttttatgaatatcactcggcagatgttcagttgtttttttatcagtaactttgtctgtattattataattttgtctcacgccatcaagctttgctgcttttccagtatgatttttatcggtattatgtgctagttgtataactttgccttcatttttattagagtctttgtcagtatcgacattagatgtcattccaaggctattatcaacacccttatcagtgtctttagcaatttgagtatccatttctttgaaatcatacttatcgaggtgagtgttatccgacatatcggataaatgatcaacatcattttgcacatctttgtcaacactactatcagcatctttaaccacgtcagactctggttctatcacatctgctttatcagacgcatcttttggatttgttgcagtgctgctattttcagctgtatccgttgcagtaaccttatcttcttgtcctgtttgtacatttagaggttcaatcgtgttattttgtgatgtgtcatcatcttttgtcttgatatcctgatttacaattctgacatgatattgaccttcataaccaatgtttgccacaacgactttaacaatcgcattataaattgctttgtcaggtacatatgggaaaatcagcgttctagaattatttttaggatctttagaaacagtagtgacacgtttaccttctacaattaaatctttccagtaactgtcatcctttgttttcatcactacatatttttgaccatttaaagttgctgtatagaatggatgttcaacaaatccatccatgactgactcactattttcttcactttcaaaaacaacaaaatgagcctcttgtacatctgttaattgatcatttgtaggtgtaacattttcaaattctgtcactgcagacttaacttgatcggctaactctactctagtttgatctaatttctttttatattctgctttatatttttccggcaatttatcttgtaatttttctaattcataaacttgtctttctaatgttttagctttgtgatacggagctaataatttttgtaaattgtatgtttcctcatccacatagtcgtctgggttattagtaataggctgtgcaaagaccattaatgtataatcataatcttcatggaagttctcaccatattcaatagatgacacaattttaacttctctcgccccattagaaactggaaaacgaatataggcataatctttatcagaatcatatgatactaattcgactggtaactttttgtcaccttcataaacttcaaatttcttccatgttgaagctgtctttaaacctaattcaattattggtcctgtttttgtaaaaataacagttgctggttcaacagtactagcataatgataaaactgtctctcacctttatcatttttcatttgaaaatcaattggtcgccaatgatcagctgtatgttctttatcgatgatagccgggtttttaatggcatcttgtagtgattcatctgctggtggatactgttggttcccatttgactgattacttgatgcattcgttacatcgttagtattgtcattagaatttgtttcatgagctggttggcttgatgcttgatctgaattcgctgacgcttttggttgtgcaggttgactcatattgttcgttgcctgcggttgatcattagtattgttggtcgttgatgtattttgattagatgtattcgtgtttgtttgattacttgcgtctgaacttgattgatcattcgttgctactgcatcatttgtatctgattttacaagtgaaggatcgttataaataggtttagcaaatactaatttagtataatcataatttgtttcagctccatcatcaatttgagttgaagagacaattttcagctcttgtgtaccatctgaaacagggaatcgaatataggcatggtcttctggaacaggactatacgatacaagtctcactggcaatttttgattgttttcataaacttcaaacttcttccatgttgaagcagtattgatgtctaattcaacctcagctttctttttagtgtaatatacatctgctggatctttgatgctgaaaaagtgatagtactgcgtttcattgtttttatctaataattgaaaattaacttgttctcttggacctatatcatgttctttattttctactgcaggatttttaattgcatctttaagtgattcatccgctgcaggataggttttcgcagtgtttgttggttgcgtagcaggttgtgtttgatttgtatcctttggtggctgagttgtagttgcattattattttgattttccgagattttatctgaagtatttgtattttctgctgcttgcgcttgatgttgagaagtaattaaaaatagtgtactgacaatgaccgatgcaacgcctagagttgattttctaatagaatagaaagaccttaattttgggtgatgtttgttcatgttgttaacaactcctataagatggtatttaattgataataattatcaatatcaattattagtgttaattgtagcgcatcccaattaaatattgcaacctattttattaaaaatttttaatatgaatgttcattgcatcgctttcctattcttcaagcccactttttatcttggaatacattaattaaccatcttcaaacattgccgttagattcgccaaattgaatctatttttagcacagcaaaaaaaccgaactgctgaaataatgcatctccaacagtccggtctattaaactatttacttatctttattaaacaattgacatgatgtattagaataacccaattgcatgaccatcatcagtaacatccatgtttaatgctgctggttttttaggtaaaccaggcatagtcatgattgcacctgtcaacgctacgataaatcctgcacctgttttcgcttctaattcacgaattgtaatttcaaatcctgatggtgcacctaacaacgtttgatcatctgagaatgaatattgtgttttcgccatacatactgggtaattatcccaaccattttctttaaattgttttaattgtttttgcgctttactactaaacgttacttttgaaccgccatagatttcagtcacaatcttttcaatcttttgctctaatggtaattctaattcatataaaggtttaaatgaattaggttgatcaatgacttctaatacttcatttgctaagtcaacgccacctttaccacctttttcccaaacttcagttaaggcaattcgtacgttattttctttagcccaagattttacatattctacttctgcatcggtatcatgtataaatgcattaattgcaacaaccggttctacaccgaattttttaatattattaacatgacgctctaaattaacaattcctgcttttactgcttctacattttcttcttttaaattatcttttgctacaccaccatgcatttttaatgcacgaatcgttgctacaactacaactgctgctgggtcgaatccagcttcacgcgccttaatgtccatgaatttttcagcgcctaagtctgaaccaaatccagcttccgttacaacgatatcagctaaatcacgtgctgtttcagttgctaaaattgagttacaaccgtgtgcgatattcgcaaatggtccaccatgaactaatgctggtgtcccttcaattgattgtactaagtttggtttaattgcatcttttaaaatcattgcaagtgcaccttgcacttttaaatctgcaactgtaactggcttgcgatctctagtgtaaccaatagtaatacgactaattttatcttttaagtctttaatacttctacttaagcataaaatcgccataatttcagacgctactgtaatattaaagccatcttcacgtggtacaccatttgtaggtccacctaacccaacgtttacatgtctaagtgcacgatcattcatatctaatacacgtttccattcaatacgtctttgatcgattcctaattcattaccttggtgaatatgattatcgataaacgcagacaatgcattattagcagttgtaatcgcatggaaatctccgttgaaatgtaagttgatatcttccataggtaagacttgcgcataaccaccaccagttgcaccacctttaataccaaatgttggtcctaaagcaggctctcttaatgcaaccataacgtttttatttaactcatggaatgcatcagctaaaccaactgtaaccgttgatttaccttcaccagctggtgttgggctcatcgcagttactaaaacaactttccctttgttttctcttggcgtaattttattaatgtcgattttagctttgtaatgaccataaggttctaatgcatcctctgaaatacctactgatgcagcaatatccttaattggttgtagtgttgattgattcgcaatatctaaatctgataaatgagtcaacttttttcgcccctttttgtttaatttatgcatttataatatgtaagttgtagctaagaaatttttacttacattcatataataacgaactgttaaaaacttgtcgactaaatcgggttagcgctttcatttttgcaataaattcacttattaaagttttgtattatacaacttttagcgcttgatactattgataactatatttttctattatttaaaatagtcatcttccaaaggtcatattaaaaataaaaagcaatataaagatatgccattattgttatgtcatcattttcaaatgttttctacgaaatgatatgacacaagttaacagctctttatattgcttatcgtaaagtaaacgattatttaaacattaacatgaaatatgttgtcaccctttattcttcgaaagaaatcttctataacattcatgtcattattccattgtacttaaatcccctgcatctaaatttaattcccaagcttttaatacacgtctcataattttacctgagcgtgttttaggtaatttatctttaaattcgatttcacgtggtgctgcatgcgccgacaaaccttctttaacaaataaacgaatttcttcttttaattcgtctgttggttcatatccttttctcagtgcaacaaacgccttaattatttcaccgcgaaccggatcaggtttaccaataattcctgcttcggcaactgcttcgtgttcaaccaatttagactcaacctcaaatggcccaactcgttcgccagctgtcataattacatcatcaacacgtccttggaaccaaaagtaaccatcttcatctttatatgccgaatcaccagatacataccagtctccaataaaatatgacttatatttttctggattcttccagatacgatacatcattgatggccagcctttttttatagcaaggttgcccattcgatttggtggtaattcattacctgcatcatcgataattgcagcttgaataccaggtaatggtttgcccattgagccaagcttgacgtccatcgttggatagttaacaatcatatgtccacctgtttctgtcatccaccaagtatctaacaccgttaaaccgtatacttttttcgcccattttataacttcaggatttaaaggctcacctactgatagaatcgaacgtaacgatgacaagtcatatttctcaacaatatcgtcaccagcactcattaacattcttaaagctgttggtgccgtataccaaatcgtcactttaaaatcttcaatcatactataccattgttctggtgaaaagcgaccaccagctatacaatttgtagcgccatttaaccatggtgcaaaaataccataagatgttcctgtaacccaacctggatctgctgtacaccaataaacatcatcttcttgtaaatctaatacatattttccagaaatatagtgcactaacatcgcttgttgaacatgcaatacacctttaggttgcccagtagaacctgatgtataatgtaaaatcaaaccatcatccgactttaaccattcaatgtcaaattcatcgctagcagtttccatcaaactaatgaagtctatataattgtcttctacatcctcatctacgacaacaatttttttcaagttcggtaatttatctacaggtactcgaggtaacaatgccttattagtaattaacactttagcttcactgttctctaatctatccgcaaccgccttttccataaatgcttcaaataacggcccaacaattgcaccaatttttaaaacacctaacaacgcaaaatatagttcaggtgtacgcgacataaatataaatactctgtcacctttgtcaacttctgcatgttcagacaaaacattcgccgctttattagataaccgttgcatatctttataagtatacgattcttttctgtgttcatctttgtaatttaatgctattttatcccctaatccttgatctacatggcgatctatacattcatatgccatgttcatttttccagtttcactccaagaaaatgcttgttctacgtctttccaatcaaaagtattatatgtttcttcataatctttaaggttatgtttgccttgcgctcctttataaacttcgactttcatttgaaactccccctttgttatgtaaaaacgctttctttctcaatattatacataacatttctaattattcaaaatttttacttttatcctttttctagtattaattattgtaaattttctatataatgaatttaatacaatcacgacgtcgattgaggagttgaaaatatgaatcatttaaagacgtatcaatccgaagattattacatacatgacaagcaatttgttattgaaggtcctttaacacacgaagatttgaaagcgcttactttcgatgcgtatttaaccgcatttagagatgctgaagatcagtttgaagctttgttagaaattacaacattaccagaaggtagaatttatgttgctcgccaagataaactcattgtgggttatgtcactttccactatcctgatgaaattgagcgctggtctacaggtaaccttccatatttaatcgaattgggggcaattgaagtcagcatcaattttaggcaattacaacttgcagaaaaattaatacaacttagcctttctacaccagaattcgaggattatatcgttataactacagaatattactggcattgggatttaaaaaattcaaagttagatgtatttgactataaaaaattaatgcagcggttaatggcaactggtggacttgaaatattcgctacagatgatccagaaataacaagtaatccagctaattgtttaatggcaagaattggcaaaaatattacattagaacagcaacaagcgtttgatgatattcgttatatgaatcggtttttcttttaatttttggaatatcggagggattatatgcaacaacatttatcaaaaactgcatatgtatattcagataagttattacaatatcgatttcatgaccaacatcccttcaatcaaatgcgtttaaaattaacaacagagctacttttgaatgcaaatttattgtctccagaacaaatagtacaacctagaattgcaacagatgacgaattaatgttaattcataaatatgattacgtcgaagctattaagcatgcttcacatggcattatcagtgaagatgaggctatgaaatatggattaaatgatgaagagaatggtcaatttaagcatatgcaccgccatagtgccacaattgttggaggcgctttaactttagcagatcttattatgtcaggcaaagcattaaatggttgtcacttaggtggtggtttgcatcacgctcaacctggtcgagcaagtggtttttgtatatacaatgatattgcaattactgcacaatacttagctaaagaatacaatcaacgcgttttaatcatagataccgatgcacatcatggggatggtacacaatggagtttctatgctgataaccatgttactacttattctatccatgaaaccggaaagtttcttttcccaggctctggtcactatactgagcgcggtgaagatatcggctatggacacactgtaaatgtcccacttgaaccgtataccgaagattcatcatttttggagtgttttaaattaacagttgagccagtcgtaaagagttttaaacctgatattattctaagcgtaaatggtgtcgatatacattatcgtgatccactaactcatctaaattgtacgttacattcattatatgaaattccatattttgtaaaatatttagctgatacttatacgaatggaaagataattatgtttggtggcggaggctacaatatttggagagttgtaccacgtgcatggagtcatgtattcttaagtttaattgatcaaccaattcaaagtggttatttaccgttagaatggattaataaatggaaacattattcatctgaattattacctaaaagatgggaagatcgtttaaatgattatacctatgtcccccgcacaaaagaaattagtgagaaaaataaaaaattagctttgcatatagcgagttggtacgaatctactcgtcaataagtcacctaatctgcaacgattttaaatgataaataaaaggcattcttccaacacccgtataagtcgagtcgttagatgaatgcctaattttgtgaatttattttgtagttcctcggtattcaattctgtgtggtaaaactacattgggttcttctatcttttcatcgttcatatattttgttaataagcgcatccctactgcaccgatatcatataatggctgaataacactagaaagttgtggtctaaccatctcaactaagcgtgtattattgaaactaataatttgtaattcctctggaactttaataccagcatccattgcactatgcatgataccaatagcttcttcgtcactgatacataatatagcatctggaaggttacctttcattttagcaaaagcttttacgccttctttataactttcagcaccagaacaattcaatgtatcacctaattgaagactatttttatttaacacttcagttaaacctgctaatacatcttcttgagcttttttagaatgttctccacctactaaagcaaatgatttagcgcctttttcaattaattttcccgtaatttctttcgcagcttcagtaaaatcaatattaacagatgctatatgtgcatccttaccatttgttcctgatactactacaggtacagatgattgatttatcaattctttcatttcttcagtaattgtaccaccaaggaaaataataccatcaacttgtttacttaataagttattaaaaatttctttttctttttcaggatcgttatctgaatttgaaataattgagtgatatttatacattgttgcaatatcttcaagtccacgagcaagttgtgaataatagatattagatatatctggaatgatcacacctactgttgttgtctttttactagctaaacctctagcaacagcatttggacgataattcaaacgcttaatgacttcgttaactttatttttagtttctgctttaacattttggttcccattaacaacacgcgacactgtggccatagagacacgcgcttctcttgctacatcatatatagtaactgtcataatttcctccttgtaaacgttttattcattataataacatgttttcatttcattttcatagtttaccatattttaatttacagtaacatatttttgtttggaaaaatttagcgaaaagcctgaaataaaaacaaacgctaaatgataacgaacgatatattttaattttatataaacttttttcatttttaattgtaatattttgagaaagccttttcaaatatcaattgcatttgttgaaaaatgttcacatttcagtaacaaatatgtgaatctattatattttacagataattcatagttataattttaattactactatcagtcataatctttaataattgtgaaattgaacaagtgtcgaagtattataacaatcgttaagtgcagtatacctttatttctatacaaaaaataatagccactctaaaagtaatatactcttagaatggctacaagtttaaaattgtcgattcaaagataatattctacttcaacatgacttattagttaagtagtcaatagtttccttggaatattattttaactttttagcgttatataaatcagacaaaggctttaattcatcataaaatgcttggaattcatctaaatccatttgttgacccgcatcactaagtgcaacagatggatctggatgcacctcagccataacgccatcagcacctactgctaatgctgctttcgcagttggtaacatgatatctttacgacctgtactatgcgtaacatctaccatgactggtaagtgtgtaccttgttttaaaattggtactgctgaaatatctaaagtgttacgtgtcgccttttcataagttcggattccacgttcacataaaataatgttttgattaccttgtgaagcaatgtattcagctgcataaacaaactcttcgattgtagcagataaaccacgttttaatagaataggctttttcgtacggccagcttcttttaataactcgaagttttgcatattacgtgcaccaatttggaatacgtctaaatactcatcagccacttcaaaatcatttggatttacgatttcgctgacaacatttaaatcatatttatctttaatttgtttaagtattttaagaccttcgacacctaaaccttggaagtcatatggtgatgtacgtggcttaaatgcaccgccacgaataaatttttcacctttagcatgtaagtttttagcaacagcttcaacttgttcaaatgattcaactgaacatggcccaaatacaaatgatttattgccgtctccaataatgcccccattatcaaatgttacaatcgtatcttcaggtttcaacttacgtgatacatataaatgtttttcattttcagatttttgtaaatctgtagaggctttgaaaatttctttaaataattgcttaatagtattatcgttgaatggtcctttgttactatcgattaagtcgttaagcatttctttttcgcgttgtggatcatagatacgtgtaccttgttttaatttttcttccccaattttttgtgctagttcaccacgtttagataataagtctaaaatttgatgattcagtgagacaatctcacttctgtatgattctaatttattactcatccttactcacctctacgaattatttcaagtatattccactttaaagcaataaaatataatgttaaaaaatattctaacaatatcatatgtatagttcaaccctaaattgacagaaaataattaattttctaactatatgatgcttgactgacatttcgattttctcagtcattgttggaaagttatattctatattgatatttattagcacatgttaatcaattaaataagtgtcatgattatagcttattttgagtcaacattacagcttttaagaaaaattttggtttctatcttctattataaatctaaaattctcatacattcaacctaacgcttaataaaaattaacaacctttgtatattaatataaatctatagtgaacatcactcaccaacatattcagccatatttgaattagtgaacgtcattgtacctacttagattcattatttatttgattatcaaatatttttccatcatcagcttaaaatgtgcaatatcactattgttatctaaagatgtttcaaacaacataaatacatgaaatgatcgcgttgcctttcaaaataaactgatgatatcaaaaaaggtaagcacctgaatgcctaccttttattttgaaattcaatttttaaaaatataatacatagatgactgctatgattgattattaaacgattttagtatgcttagtcattaaatgtacgtttctctattttacttttagctttttcaactttagcatttgatttttttgatgcattggatgatttagcatttgttgcttttgaatttttttgattagtctttgtcgttgagttacttgaactactttgtttctttgcaccttgtgatgctttcttattatgttgctttttctgacctgaagttttatttgtcgatgcttttgatgcatttcgtttatttgaaggtgttgtttttttagattgtttacctgatttcttgtcaacagctgtattattaggtgttttttcatcagctttacgtgtaataacaccattttcaaatttagcttctttttgtttaacagtgtctttattatctgtattaactgtttctgatacatcattctttttagtaactaatagaggaatttctttcaagtcatttttagcaactggtttttctgcaaataacgcttcagttaattgactctcttttgagcctggtgttaatttagcttgcttctgttttgcagcgtttgctaatctttcagcttgtgactcttctttcgatacgtttaatgtcgatgcttttgattcttcatttgatacatctgcacttttatctgtttctgcttgcgcttctttcttcgcttcttgaatcgcttgtgcttcttgtgatgtatcacttaaattatttgcacttgcttcttcttttatcgctgcttgttgtgccttcaatgccgatgcctttgactcttcatttgatacagccgcacttttatccgtttctgtttgtgcttctcttttagcttcttgaatctcttgtgcctcttgtgatgtatcgcttaaattatttgcacttgcttcttcttttattgctgcttgttgtgccttcaatgccgcttgttcatttttagatttgtttaaaaatccttcaacacgttcttttgtaaaggcaaccgtttcttcaagttgcgtttttctttcttcaaacttttgcgacagttcttgttctttgacttttaaatcatctgctttttgataaactttatttttaaaatataagcctaaagctgaaccaacaagcgcgccagttataaaactaacaacaaaatctttacggtttggtaatggttcattttgataagtgtgtttattttttaatgttcttttattattttgttgttgcgtcatttgtatatcctcctataacaaatgcacttaaataagtaacaacctcatttaagtgcatttgtttaattattaattatttatctactcgagaagtatagctatgatttgcatcagttgctacattattagctttgtaatttgcacttccacgacggtagtgtctattttgccatttgtctgcaatttccattgcaacatttgaccattgaacaacttgtgagattttatcttcattttgagaaatattatgtgtaattgaatttgttacacgatctacagagctgtttaacgtttgtactgagtcaccgatacctttaacagcatctactactgagtttaaacgatctactttaccttggatatcctcagttaaacggtttactttatgaagtaaatctgttgtttcacgagtaataccttgaacttgaccttctacaccgtcaagtgtttttgcaacataatctaagtttttcttaacagaatttaatacagctacgataccgatacataaaattaagaatgcaatcgcagcgataattccagcaattggtaaaatccaatccattaaaaacgcctcctaattaacatgtaataatgtcattaataataaatacccatactactctattataaacatattaaaacgcatttttcatgcctaatttatctaaatatgcattttgtaatttttgaatatcacctgcacccataaataaaataacagcattatcaaattgttctaatacattaatagaatcttcattaattaacgatgcaccttcaattttatcaattaaatcttgtatcgttaatgcgccagtattttctctaattgatccaaaaatttcacataagaatacacgatctgctttacttaaactttctgcaaattcatttaaaaatgcttgtgttctagagaaagtgtgtggttgaaatactgcaacaacttctttatgtggatatttctttcgtgctgtttcaattgtagcactaatctctcttggatggtgtgcataatcatctacaataacttgatttgcaattgtagtttcattgaaacgacgtttaacaccaccaaacgtttctaatgcttctttaatatttgtaacatctagcttctctaaataactaatcgcaattacagctaatgcatttaaaactgtatggtcaccatattgtggagataggaagtgatcataaaactcaccatccacatacacatcaaaagcagtacctttatccgtaatttgaatattttgagcataaatgtcatccgactctttaaatccatagtaataaattggaacatctgcttcaattttacgtagatgttcatcatcaccccaagcaataataccttttttaacattatgtgccatttcttggaatgcatcaaaaacatcattaatatctttaaaataatcaggatgatcgaaatcaatatttgtcataattgcgtaatcaggtttataacttaaaaagtgacgtctatattcacatgcctcaaaagcgaaataatcactttcaggcaatcccatacctgtgccatcaccaattaaaaatgaagtctttttatcaccattcataacatgtgataataaacctgttgtagaagttttaccatgtgcaccagttacagctactgaagtatattgatcaataatctgtcctaaaaaatcattataacttacaacatctaatttcaattgatgtgcacgtactatttcttcatggctactcgcgaatgcattaccttgtataactaccatatcttcttttatgttattagcatcaaatggtaatatttttatccccttatttctaagagcaacttctgtaaatacgtagttctcaatatccgatccttgaacttcatgtcctaaatcatgcatgatttgtgctaatgaactcatgccagaacctttaattccgacaaaatgatagtgtgtcattatataaaactccttactcataattattctttatttaaatctgcttccgtaacataaacatcccttggttttgaaccattagcactcgaaacataaccgagttgctctaattgatcgataattcttgctgctctattatagccaatttggaaatgtctttggattaatgatgttgaaatatgtccttcattaaccataaatgcacaaacatcatcaaataattcatcttgtgattgtgtttgtgttttttcaacaattctttttcttcaaataggtagtccggttctctttgttgtttgataaaatcaacaacatcatcaatttcgtcatcagaaacaaatgtaccttgaactctaatcggtttattcataccgctaccaagatataacatatcgccatatcctaacaagcgttctgctccaccactgtctaatatcgttcttgaatctacacttgatgataccataaatgcaattcttgttggtatgttggctttaattaaacctgtaattacattgacagatggtctttgcgtagctaccaacatatgaataccacatgctctcgctttttgagcaattctagcaatagactgctcaacttcttgcggagccatcatcattaaatcagccaactcatcaattactatgacaatttttggcattctttcatcatatggtgcttttttgttaaatgctgttatattacgtacatggtaatgtgcaaataacttataacgtctttccatttcttctacggcccattttaaactctgtgtagctgctttgacatctgtaattaccggtgcaactaaatgtggcaaaccattataaggagctaattcaaccatttttggatcaataagtaataatcttaattcctcaggatgatttttatatagtaaagacatcaaaatactattgatacaaactgatttccctgatccagttgcacctgcaattagtgcgtgtggcgttttagcaatatccataagtaatggttcattattaattctataccccatcgcaactgttaatttagattcagcatttttaaaacttggagattcaataatagaacgtaagttgaccgtcgttggattttggttcggaacttcaataccaacacgactagttcctggaattggcgcttctatacgaatatctttcgctgccaatgccattttaatgtcatcttgtaatgccgtaattcttgaaactttaacacctttttcaactgataattcaaatcttgtaacacttggaccttcagttacatcttgtacttctgcaggtacattaaagtaaaataatgcgtcattaagttctttctttttatctgtaatccagtcctcgtccggctcaataacttgtggttcttctagtaatgaaacacttggcaatttaatatttgggcctttacgaatcatcggcttagaagtttgtacagcttgatttgttgcaacatctggttgattcgtccgaggtctattttcattagctgtatcttcattttgatttgaaaatgaaagctgtaaatctttttgttgatcatcattatcttgttgtccactagtattgttttgatgtgttgtttcttcgctttcttcagttatgtcgcttacttctgaaactgaagacgaagttgattgatcaacttgctcattttccaattgattatcatcttggctttcttcaaatatttccgtttgagttgaatcagcagaaggtttctgctctgaatattgttgtgcattttgataatcattttctgttgctgcatgaccaataagttgattgttctcaacattgtttgatgtcatattatttgttttatatgcattcgtgtttgactcttgtgaatcagtacttgatgatggtgtgttttgagtcgcagtcttgctttcactcgcagcttgtttactttgtacaggctttaattcaggcacattgacttttgaatgctttttacgatccatcatacgctttttatcagatggcgtcatgacaacattaaatggtcttttacttaaagttgaaaccttttcagtctgtttctttggatttacgttttcaatagttttctcttcgacattttgtttactttcagctgcttcgttttgcacattttctgtaatttctgcgttttgcttttctatttcattcatgcttgaatcttccacaacatgaccatcattcacatcattcgttttcaatgagttgacacttaagtttgtttggtcatcttttttatgacgtggcgctaattcaatttcattatcaaccgttttatcgatattattaacttgagattcagttactgcgtgctcttgcgttttaggagcgtctacatgcatttcagacgcgtctctattggtattatcttcgctatttgaagtagtatcctcatctacttctgtatcatttaattcataaaattctgcatcatcgatttgacttcctgaatattcttcttcattcgttgctccatcttcttctgaatcagcaattaatctggattgattttttagttcatcttgattatttacttcaacgttatgttgcagtgctgattgacgttgagacgttacatccgaaaccgtaacttcatcatctgacaattgttttgttgtcgatacttgattcaaactaacttcctcataattgtatggactttcatctacatgagtgtcatcagtgtcttcattttgtattgacgcttttttattttcatcatttgatacagcttcatcctctatttcatttgtatgaagctgactagcctctgtactattatctgttaagtcactatcatcatttaatgaactatcaccaacatagcgttccgcttgtttagcatacatttcatcaattgcacgttgtattgcatcttgctcttcgtttttatgttcttcacgcttttgttgcaacgcttttttaaatcgacgcttttgaagcactttacgttctcgttcacgtctaatttcttcaacaatttgtgaagcataaatgttttcaattttgatagtattatcaacttttgaataattaggtgttgattttgttgttgatgatacattttcatcagatgatttagatgcagttccttgcttgacaacactatctttttgtttctcttgttctaaatgtttattttgagacgtttgcgtcttagctacatatttatcatatttttgtttatctgactcaactttttctgaagatttacttacagggatacgaccattttctaactttttaggtttcattgtgccaaaaatagctgacggtacctctgaagtcttgaaactttctttgtgataatctgtagttgaatctttagcacgatgatttgtattattagaatatatattgtgtgtttttgacttgtgcgtttccttctcaataccattaattgcagaaacatatgtacctggcttattcgtatggtaatgtgaatgatctttatattttatactttgctgtgatattttagaattcccacgttgttcactataattttgttcttcagttgtttgatttcttctacggcgatgtcgtttttgtgaacgagaatcgtggctttgtttgcgatagtctcgatggtattgttctttttcatctgaaatagtatctgcagattgttcaacattttcattttcataagctacgctcataggaaaacggaattttcccctcggacgactataaatatcattattttgaggcagtaatgagtcatgatcgttatctatattttgtgattcttgacgtctttttttctttctatgaatcaagtcatcatttgaatcattatcttcgccgaataatttatcaaaccagctcatattttcactaccttccttaattattcaaaaaatgcttgtccaatttcatagctgtcatttaataccataatacctttttcttcaggtgcattaggtaaattcaattctttcattgaacaaatcataccgcttgaggcaacaccacgtaattcagcatctttaattaccataccgctaggcatcactgcacctactttagcaacaacaactttctgtccagcttcaacgttaggcgcgccacatacaatttgtaatgtgtcatttccaacatttacatttagtacacttaatttatctgcatcaggatgtttgtctttagtttcaacgtagccaactacaaatttcggtgatagatcagcatttaatttataatcaaaaccagcttctgaaatacgcttttggaatacatttacaagttcatcagttaatttaatatgacctgtttcttcaattgttatatcttttgaaatttcaaaaatattataacctacaacattaccttcattagtaatttcaacaacgttaccttttttattgtagtttaattcaccttcaactggttcaatttgtaaaaatgcgacatctcctacatatttaggattgtaaaataaattcattatgacaaaactccttatccaattatttctatttatctttattaaatttacgacgatttgcttctaaacgctgaatcacgtttggatctcttttttgtttattatttttacctaaaataaatatcggttcaagatgaccctgtttatatccaaaggataatgatgtaattggaactagacctttagtgaaaaattccattgttaaatgtgccatcacatcatatcctgttttattgcgtatatctgcaataattaacacatcttggtgtggcactgctacgagcatttcaccttgacattgtgcctcaatttcatttaaaaatgcagtatttagaatcctacttgcatcatacccgtcatttgagttaataaagtaaaaaatattaccttttacttcatcagtcgtatatgaatttgataattttctaacattaaacagagacatttctcttatttgttgttcagttaacttcaaatcctctaacatgctttcatcaattagacgatatgattttcctaaatcgactgcataataaactgctgtttctgcagtatgctcatcatagataaaaggaacaccttgtttagtttttttatcaaagctagtcgctctaatgacaggcataatttgactagatgatatactctcaagggttttatctgccatttgtgcaatagcttcatcaacgtaataaacaatttcatctacaattttttcttttttatcttcatattttgcgactatagcgttaagtttaatcgtgatacctttgttattatctgttcgataaatacgcaaagtttcttcttcacgattaaatttaaaatcaacgtctaaatggcttaaacgttcctttaatttatctctcatttgaaaggtattcatatgtaacactcctaatttcgcaccttataatagtttacaataaatcaacacatagtaacagagaaaaacgagtattaccccgtttttctctagtctaaattacacgtattgagctaaaaatgcatctatctgttcaattgattttcgttcttttccaatataacttccaagcagttctccatttttatatactagaaaacttggaatccccataataccattttcaatacaaatatccataaatttatcacggtctactgatacgaagtcaaacataggatatctcgcttctaattccggtaaatctggttctatcactctacaatctggacaccagcctgcagtgaattcaaatactgtagcaccttgttttaaagattcaaattgttgttctgattcaagttgtttcatttttatgtctccttaattaatgattatatataactatttagaaataatagttgttattacccgattatttatattgtaatgtttctatttgattgttatctaaattacaaatggcttctgaaagtaaagatctagcagcaaaatagtctcttatatcaaatactgagtctgtactatgaatatatcgtgcacatacaccaataactgcagttggaataccaatattagctttatgaatttctccaccatctgttccaccaggtgacatatagtattgatgttcaatgtcatgtgcttctactaactttaataaatagtctctaaatgcaggctttaaaatcattgtaccgtcttttatgcgaattaacgtacctttaccaagttcaccggataatggttgattacctttaacgtcattggcaggtgaacaatcgacaacaaatgcaacgtctgggtctatcatctctgcagatgctttcgcacctcgtaatccaacctcttcttgaacatttgcgccaacatacaagtctacatctaattctatatcttttaataattctagtatttcaattgccaagacacaaccataacgattatcccatgctttagcactatatcgatgttcagataactgtgtgaatggcgtgtgaggtacaattgtatctcctatatctattccgcgctcacgcacttcatcttcattttgagcacctatatctaatgttaaatctttaatttccggtgcaccttcactaccagtacgaaaatgtttaggtatattagaaacaacaccgataattttatcgccatttctatttttaattactaagcgttgtccttgccaaatatcatttgcaacaccacctaaatttgtgaattgaatcattccatttttagtgatgtttgtaatcatgaatccaatttcatccatatgtgctgcaatcattacacgttttgcatttggatttttagattttttaacaccaaaaaaaccacccatacgattttcaataaattcatctacgtacggcgccatttgctgagtcatataattttttacttcttcttcaaaacctggtgccccatgaagctcagttaaagtttgaattcgttgtaatgttacttttttatttatgttcataaaagttctcactccttataagttattatatcatcttcaatatggtaaactaatgatatgaatttgaaatcaagggagcataaatgatgactaaactgaaatatataattccaacaataattgcagtagccattgtaattatttctaccatttcaatcatccaatttattaatcgtaaacgctataatcccgttaaagtacttaatgaagtaaaatcatattttatgaatgtcaaaggctcatatatcgtttatgaaccattcgttcatcctgaaactgataaataccgtttagtttatcaaggtggaattacaactattaaaaatggtcaaaatattcattatgatttttatgcagatgcatatactggtgaagtcattaacattgtagagcgttaatacgaattttatccatatttgatttggatcgtaaaacttaaaaatgagccacaccctaattagtaagataggatgtggctcaattttttattcttgaaaatttgtttagtaatacatctttttttagttattatcaactaatgtttcacgtaaaatatatgcatctatactttcgccatcatcgctgtattttacagcaaagtagttttcatcatgataaaacaagaaccaatattgttgctggataaaatatggtatcatgcgttccttttcacgaattgattgcataggataatcatcatatgctgttacccatagaggatttttatgtgcagtagtcgggaatatatcacccatatgaactgctttatctccttgactttcaatcgtaatgattgtgtggccaaagctatgacctccactatgttgcatcttgatacccggaaccggttcaaaatgtttttcgaataaaatcaacttgttactataatcgcctttattcttatcccagtaagttgatttacttcttatattaggtgcaataaactcatgccactcatcttgttgcacaacatgaatcgcattttcaaaaattgcatgtcccgcttgatcagtcaaaccggcagcatgatcaaaatgcatatgtgtcattagtacataatcaatatcctttggcgttaaattataatttgccaaatcagcagttatatgactttcttcatctacaccaaaattacgtaattgcttttcagataatttaccattaccaatacccgcatctataatcaaattatattgagccgtttgaatcaaaattggatgtgtcggtaaattgatttgatttcgttcatttgcattgtattgctttgaccacaacggcttcggaacaacaccaaacattgcaccgccatccatttttgtattgccaccatttagataatgaatagatatatccccgattttcataacatcacctattctttctatattcgttattacaattagcatgtgtttattacatcatatcactattcataaatgcgaacaaaaatgaaacgccccacactaatacacttccaactacttataaaaattaatgcaatcatattatatgtaaatgcatcataaccatcggactgtaattttaaattaataattaaaatttccaagtaaaatgcaagctttattctttcaaatcaaaggtatttagtataacattgttcataggcgcattgtctcctttagtttgggtttggtcactttaaattatagaggcaatagcgcttttttgtattaaaaaacaaaaagttccacctttccaccataaaaggtgaagaacctttttatattcaaaatcaaaaaagcggacatatgaaaagtgaaaaaattccatctgtcgggtttattacagaaccaatatgctttatctaaagaaccattatagtacgaaaaaacacttatgattgtatgtgtacataccctcataagtgctctatttttgtgaatggaatttcgcttccatacgataaatacgtgaccctttatccgaaaatttcttttcatattctgttaaaatattactgccatcgtcttcttgatgtaaatttagatttatttttgtaaaatacattccaaattgagacatactttctaaactgtaggcaaatagtcctctgttatcagttttaaagtgtaaatctccttcatcatttaagatttgttgatacaacgctaaaaacgtatgatacgttaaacgtcgttttgcatgacgattttttggccatggatctgaaaagttcaaataaatacgcgaaacttcgccgtttttaaaatattcatttaattcaatggcatcattacaaataatctttaaatttgttaaacccatctctttaactttatccaatactttataaacgatacttttctcacgttccattgaaatatagttaatatgaggattttgagcagctaatgttgtaataaactgccccatacccgaaccaatttcaatgtgtatcggttgcgttttatcaaaccattcagtcatttcccctgcatgttgaccgtccatgtcaaccaattcaggatgatcttttaaataatcttcagcccatggtttgtatcgaactctcatattttattctcctcttaaataaacatgttactattcataacttcatttaggaatttaagccaagtgttcatatccttatatcttttttgctcttcataccattgaacaagacctatagattgaattaccgtataccatttcatacgtttatttaaattcaagctctcttgaactccatatgtttcaagccattcagaccattgttgttgtggaacatagttgtaaagcagcattccgatatcaattgccgggtctgcaatcattgcaccttcccaatcgactaaaaatagttcatctcgatcggataataaccaattattatgattcacatcaccatgtacaacagtgaaaaaacgcgaatctaaactcggtatatgctcttctaaataggttaatgattttctcacaatatgatgtgttaaaacttctcttgataaagaggcattaattttattaagcataatctcaggagtaataggttccatttccatacgctttaacatactcaataaaggtctagaattgtgtatcttctttaataaatgtgcaactcttgtttgcttcatttcatttgaagatagttcacggccatttttccaatgttgtgctgtaacaacctcgcctgtttctatgcgtttcgtccatactaatttgggcacaataccttctgctgataatgccgcaataaatggatttgaatttcgttttaaaaacaacttttgtccatcttgttcagccatatatgcttcaccagatgcaccacctgcagaatcaagtgtccaccctaattgataaaactgctccaactcgtccacctcactttcaattagaaaatggctctagaaataggtttttcaagagccatatattctaatttataacaccatactggtacaaattttatgtccagataattattttaaatcctcaaccaatgcctacattacacgactaaatttaaatcgtaatgtctgtcattgacaccatacattctatagtcacttacttgacataaaatgttaccgtgtctaaaactacatgtttttgtaacttttgtaggcgataaactctagttttcaaaataattgctatcccattttcatggttaacataaatttatgaactgtaacatttacgtacttagtaaaatatgatgcacatcatatttgtaactcatagaaaattttataatttttatcattatatttcaactgaaaatgagaaacaaaatggcactttttactaatatgtgttttctaaacaacacttttaagcttcgttttaaattataacataattcacttacgaaagttgataaatttaagtaatttaatctaaaaatatgatgatagaattttaaatactgtgtgactctatatacttttcaaatccttcttgtaattgacgtgtaattgggccaactttaccatcattaactggttcaccatctaatttaataacaggtgtaacctcagctgaagtacttgaaacaataacttcatctgcgtttctcaagaaatctacagtaaacgtttcttctttaaatgggatgttatagtcttcggcaatttttttaattacaattcgggtaataccattaagaatatagttgttaatcggatgtgtataaatcacaccgtctttaattgcataagcattacttgaagatccttcagtgacagtttcgcctcgatgttggattgcttcaactgcattatatttcacagcatattcttttgctaatacatttcctaataggttcaagcttttaatgtcgcaacgtaaccatcggatatcttcaacggtaacaccattcacaccattttctaaatgatcataaggacgatcataactcttagtataagcaacaattgctggttctacttcaggtgtcgggaagctatgatttctttcagctacacctcgcgttgcttgaatataaattgccccagtttcaatttgattcatatcaactaatttacgagatagttcaattaattcttctacagaataatttaaatctaaaccaatctcattggcactacgtaaaaatctttcataatgttctgttactgtaaataacttaccattgtatactcgaatgtattcataaataccatcgccaaatacgtatcctctgtcgttgtatgaaacctttgcttcacttggacttacaaactcaccatttaaaaaaattttttccatatattattcctccacgcataatgaataaattgcttctaagtaaatactagttgcgttaaataactgttttttagtgatatattcatttttctgatgcattaaatcttcagaatcactaaacattgcgccaaatgctacacccttgtctaagtttctcgcataagtaccgccacctatagtataaggttcagtcatatcatttgtttgatttctatatgcagtaactaacttttgtacaaaaggatcatttttatcaacataatgtggtggttggactttacctaatttcacttcaaagccatattgttgaatctcatttgcaaaacgatccatagctttttcaaattcaaatccttctgggtagcgcaagttgataccgaaaagacccgcattttcattatcatatgtaataacaccaatgttagttgtcacatcacccatgacatctgtatggaatttcattcccatcttttcaccaaaatctgaattaaataagtagcgattactaaatgctacaaacgcttttgcattattatcaagatttaatgatgctaagaattttagtaagtaaagacccgcattcacaccgatagatgggtccataccatgaaccgctttaccttcaactgttaaaactagaatgccactatcaacagtactatcaccttgtaaatgattttgttctaaaaaatactcaaagtcttgaataacatctgtcatattttctttaacaagcactcttgcttctgcatgatcaggtaccatgttgtaacgttcaccagatttaaaagttattaattcataatcaggttcatcttgatcttcagcaagcttattttgaactaagtcaaatgttgtaatgcctttttcaccatgaatacacggaaattctgcatctggtgcaaaacctaatgttggcatttcttctgttttaaaatagcgatccgtacatttccaatcagattcttcatccgtaccaataatcatatgaatacgtttcttccaatccacattcatatcttctaatatcttaattgcataataagcagcaattgttggacctttgtcatcaagtgtacctctagctatgatagcatcttctgttacaaccggctcaaacggattactatcccatccatcaccagcaggaacaacgtcaacatgacataagatacctaatacgtcatttcctttacctgcctcaattcttcctgcaatatgatccacatcatgtgttgtaaatccatctctatgtgcaatttcatacatgtagtctaatgccttacgaggacctggaccaactggtgcgtcttctgatgcttttgcatcatctctcacactttcaattgctaataatccttttaagtcattaatgatttgatcttcgtattgttgaactttttctttccacattcgaaatcgacttccttttttctataagttaaatcctattttacatgaaatgatataaaaactacaataagatgtcagaaaataataaaaaggaacaaaacaacgctatcgatttaacataaaattaatgataactgctttgttccttttctgtattaatttaatttaatatgccagttcaataccaacttattaattgtatgccttattctttatcagacaatgcatttttattcttttttaaatcttcttcagtgacgatacgtaaattattatttggtgctgcgccaccttcatcatcaaatttacctttttcaatactttcgtcagtcttattgtcatattcggtaaattttgatttttcttcttcgaaaaatgcttttggattattttttaatctattagcatattctttcggatttgtttttacttctttaattgtttcatttgcaattgttcctaattgcgtcgctttatccttagcattatctttatagctttgaggatcttgtttgtatttattatattctgctttcagcttgtcacgactatctttacgtgtaacaagtacagctgctacagcgccacctatacctaaaatcgctttaaataaattaccttttgccatatcaatcgtctcccttttatttataatttaatttgtcaaaatcattttcagttaataaacgatattctcctgaatctaaattgctatccaattctaaatcagcaattttgatacgtcttaaatgtaatacctcattttgaatgctatgaaacattcgtttaacttgatgatattttccttcataaattgttacgtgtgacgtttgattatcaatataagttaatattgcaggcttaaccttgccatcagacagtgttataccctctttaaaagcttgaatgtcttcttcagtgataggatttgctgaaataacttcatattttttagaaacatgtttgtttggactcattaattcatgattaaaatcaccatcattcgttatcaataaaagcccttctgtatctttatcaagacgaccaaccggaaaaatatttaaatgttggtattcaggtattaaatcaataacggtttttgaatgatgatcttcagttgccgatatataaccttttggcttatttaacataatatagacattttcaacgtattctattaattctccacgaactgatatcttatcgttttctggttctatatgtgtttttggtgatttaattacttgttcgttgacatttacaaggccttttttaagtaactgtttgacctcattacgtgttccgacgcccatatttgctaaaaatttatctattctcatcgtaaaaacctaactctacgtcttaatttttcaggaatttcacctaagaattcgtccgcaagacgcgttttaattgtgattgtaccgtaaattagaataccaactgttacacctaaaatgataataattaaatatccaagttttgttggctctaagaataggttcgcaatgaagaatactgcttctacacctaacatcataataaatgagtataagaatatttttgcgaaatgaatccagctatagctaaatttaaatttcgcgtattttttaagaatatagaagttacaaccaattgcgaataataatgcgatacttgtgcttaaaacagcccccggcgtatggaatagcataattaatgggtagtttaatgctaatttaattgcaacagaagctaaaataacataaaccgttaacttctgcttatcgataccttgtaacattgacgccgttacacttaatagtgaaattaatattgctacaggcgcataatagaatagcaaacgactaccatcatggttagggtcatgacctaaaacaattggatcgtaaccatagaatactgtgaataacggttgtgccaaggccataattccaatactagctggaacagttataaacattaatacaccaatagatgttctaatttgatgatgcatttcatgtaagcgaccttctgcaaatgtttttgtaatataaggaattaaacttactgcaaagccagcacttaatgatgtcggaatcattacaattttattagttgacatatttagcatattaaagaatatatcttgtaactgtgaaggtataccaactaaagataaagcaccgttatgtgtaaattgatctactaagttaaataatggataattcaaacttacaataacgaacggaatactataagcaataatttctttatacatcttgccatatgacacatctatatctgtgtaatcagattcgaccatacgatcaatattatgcttacgctttctccaataataccagagtgtgaatataccaataatcgcaccaactgctgctgcaaaagtagcaataccattggctaataagatagaaccatcaaagacatttagtactaaataacttccgattaatatgaaaatcacgcgtgcaatttgctcagttacttccgataccgcagtaggtcccatagatttataaccttggaatatacctctccatgttgctaatacaggaatgaagatgactaccatactaatgattctaataatccatgtaatgtcatcaactgaccaaccatttttatcgtgaacatttctagctaaagttaattcagaaatatatggtgctaggaaataaagtactaagaaacctaaaacaccggtaatactcatgacaataaaactagatttataaaatttctgactgactttatatgcaccaatcgcattatacttcgctacatatttagaagcagctaatggtacacctgctgtcgcaactgcaattgcaatattatatggtgcataagcgtatgtgaacggcgccatattttcttgtccaccaattaaatagttgaatggaatgataaaaagtacgcctaacacctttgtaatcaaaatactaattgtaattaaaaaggtcccacgcaccatttctttactttcactcattacgtatctccctatctcatgtttattaatgttttgtaaataaaaagctatttctctgtaaaatcattttcattattatgaatatatcacaaaactttatttcattgtcgtatattcaatgaaatatcataacaaaaataataacgtgttgtcactgaatactcaaagttgctttgaaattcataaattttcatattgtcattatactactaacgccaataaatggcggacaactcttaaaataataatagcgttcgaataaatgcttatccttttatgaaacacacattataaatatattcagcgcgagtgtcatttcataacacaagagatatagcaaagtttaaaaaagtactataaaatagcaattgaatgtccagtaacaaatttggaggaagcgtatatgtatcaaacaattattatcggaggcggacctagcggcttaatggcggcagtagctgcaagcgaacaaaatgacaacgttctactcatcgaaaaaaaagaaaggtctaggtcgtaaactcaaaatatctggtggcggtagatgtaacgtaactaatcgattaccctatgctgaaattattaagaacattcctggaaatgggaaatttttatatagtcccttttcaatttttgataatgaatccatcatagatttttttgagtctaggggtgttaaattaaaagaagaagatcacggtcgtatgtttccagtttccaataaggcacaagacgtcgttgatactttagtgacaactatagaaaatcaacatgtaacgattaaagaagaagaagctgttagtagaatcgaagttaatacagaccaaactttcactgtacatactcaaaataatagttatgaaagccattcgctagtaattgctacaggtggtacaagtgtccctcaaactggttcaacaggtgatggttataagtttgcacaagatttaggtcataccattacggagttattcccgaccgaagttccaattacatcagctgaacctttcattaaatccaatcgtctaaaaggcttaagtttaaaagatgttgaattgtcagtacttaagaaaaatggtaaaaaacgcatcagtcatcaaatggatatgttatttactcattttggtatcagtggtccagctgcattaagatgtagtcagtttgtttataaagaacaaaaaaatcaaaagacacagcatatttcaatggcaatcgatacatttcctgaattaaaccatgaacaattaaaacaacacatcacatcattattatcggacacaccagataaaatcattaaaaacagcttgcatggactaattgaagagcgctacttattgttcatgctggaacaagctgaaatcgatgaaaataccacatcacatcacttatcaaatcaacaattgaacgacttagtaaatatgtttaaagggtttgtatttaaggtaaacgggacattacctatagataaggcatttgtcacaggtggtggtgtgtcactaaaagaaattcaacctaaaaccatgatgtctaaattagttcctggattatttttatgtggtgaagtattagacatacatggttatactggtggttataatattacaagtgcactcgtaacaggacatgtcgctggattatatgccggtcattactcacatgcatcaatggaataatagtataaaattgggttcgattctctctagtagatcaaccttttcattcaattaaaaatgaccttaatataactgagtcactaaaaagtgtcgttatattaaggtctttttgtttattatgattctttttcttttttagaacgtcttctagctaataatgctgcgcctgtaattagtgctaattcttttaatggtaaatccatttcttcagaaccagtatttggaagttcttttacaacttttcgcacttcttgtttatcttcttttttaataggcgtacaaacttttggagcaggttgccccacttttggtgacgcttttatcacttcagcaggtaatttaattgctaaaatttcatcaataatgaattgcgtatgttttttgatgtcatttaatgtcgcatcttcatcaaccattctattgccatctgcaacatattgatcaattaatgcttttactttagctaattgttctggtgttgcgatcgctttgaatttcgcatatgtttgttgagcaatgttatcaatgcgcagtaagctattttctttttcagtaattactgcttctatatcgcctaatgcaacattaaatcgttttaaaactgcatcaacatcagcattagtgcgtgctgtttttaattcttcatccatttgtaattttaatgcagttatagcttttaatgcatcagccttattacgatcacttacttttcgataattttgcactaaatgtgtaacacgtgcaagatcatcattaatcgttttttcagcatctggctttttaataggatgtacgtctaaatcatgtattgtttgtagatttaatgttgctgttttatcaacttgtgcattgctacgatcttgatcaatttgtccaatagcagtgtcataaatgttttgtaactgtgctaaaatactatttctttcttctactgttgcttgaacattcgcttcaattgcttgtttcttatcgttgaataatgttgttaattgttctcgcgcagttgcttttttattaataacaggttcgatttcacgaatttcgtttttcccatcatgcaataaatatgccacatcagcattagtcactgcaccagcaatttgttgtttagctttaattaactctttttcaacttgtactattgcagcattttgttcttcatctgtcgcttcgttatttgctttaattaaattaattttatttgtagcgatattttgaatttgttgtaatgctgttgctttaactgttgtcgctggtttaatttttgaaataatattttgagcatcgatactattttgattaacttgcgcagtcttatctgcgtgattgatctgatcaatagcttgattaagtgcttgttctactaaatgtttagcagctaatctttcttcttcggtagataaatcactttgatcaataagtgcattttgagcttcagcttttgcgctgacagattgacgcgctgctggtttaacttgaactttaggtaaaatcactttgatgttgttgttaccatcagcctcagtttgatccacttctgcattcgttttgttttgtgcaatatcatttttaattgcattaacaattttatttaacgcagcaatagcaacatttcgttcatcttgcgttgtatctagcgtatttcgtattgcatcgagttgattattattactttcatcaatgttatccaacgctgcacgtttgcgtctaactttcggtttaatttgttcgattgccttaatcgtttggtttctaacatcattgacagctgcatcttgtgtcgtattgtctatatcttgttgaccttgtttaagtgtgtcgtttatttgttggtttgcttcatctaattcatctgtcgtagcatgtggtgtatcttttatagattctacttggttatctgcgctcgcttttatggcttcttgagcttcaggtttaaccacaatgtgcggttctacgccttttaacgtagcaataccatttgattcaacacgtttcacatcattattcgctattgcttgattaatgttttgtaatgcacgtttttcattattcgctaattgatttaaagcaacttgtttttcttcatcagtcgcatgttccgcttgctcaatttcgtgctttttagcttcatattgttgcttaactgcatctctagcagctgctctaacaatatggtcaggcgtcactaatgcaatgtcgtcaagcgcttgatttgttgagtcattaacttgctgatttgttctatcattcgtgatatttgtcatagctttagcaactaaatcattgattttatctaacgccgcttgtctttcttctgctgtcgcttctttatcttgattaatttgcgcacgtaattcattcgctttttgattgattttttcacgtgctgctggtttaatttttgtttcaggttgaataattttaatcgctgatacaccatttgttgccgcttgattcacctgactattcgtttgagcttggtcaatagctgcaagtgctttttctttttctttagctaatgcttgtaaagcaacttctttctcattatctgttgaatcaagactattatcaatttgctgttgcttttctttaacagctttttcaatatctgcaattgcctttggtttaattactacttcagcttcaacattatctatagcattaatcgcttgatttgtagttgcgtctacctgatcatttgtttggttttgattaatttgattaaacgcttgatctttaagttgattgatttgattaactgcagcctgcttttcttcgtcagttgcattaggtgtttgtttaaccgcttcaatacgcttcgctacttcagcagtgattttatctcgcgctgcttgtttttttacaacgtcaacttgaacagcatcgatattattctctgccactgtcgcagcttggtctacttccgcatttgtatttgcttgtttaatactttcaatagcttgttgtctgtcttgatttaaagtattgatcgcagcatttttctcatcatctgttgcatctggtgtagcattgatttcaactaatttagcactataatgctgattggtttgtgctaatgatgcaggtttttttacaatatttggctgaatcgcattaattgcttttgtacctaattgttgtgcttgatctacttctgcattagtatcagcttgatttatattattaattgccgttgctaaatcttggtctacttgatttaatgctacttgcttttcttcagtggttgcatttgtattttgattaatttcttgtttttttgcagttgctaagtccgttaatacacctgtagcagtttgtttcttcgttacatgcggttgaactgcaccgatttgattgactgcatcgtctctaatactattgaccatcgcagtagtagacgtcacaccaatatcatttaatgctctatttttaagtgtattgacacgatttatcgcttcttgtttctcttctcgagtcgcgccaggtgtagcattgatatttgttatcgcctctcgcgctttttcatttacagcattgcgtgcatccgttttaacttgtgttgccggttgaatcacaactatattttgtgtgccctgatcttttgcttgtgcaacttcttgattcgtatctgctgcattaatattttgcttcgctgtggctacagcttgatcaagcaattgttgtgctgcttgttgctcttctaaggtcgcatcattattattaaatatcgcattatgttgcgtttccgcactttgatcaatagcgtttttagcatctgttttaacctttgtagctggttcaatggcttgtataccttgaattgcatttgtctttacttgctcaacatcagcattggtagtagcattcgtaacattatcaatagcatctgtttcatccgttgttaattgatttaatgcatcttgaatttcatcttgagtagcatctggcgtgtgattgataatttctctttgtttcgctgctttatcacgtatagcttgtttagcatttggtttaacaactggtgttgcagtgtctccacttaaagtctgtataccttgatctttaattctagtaacgccatcatcagtcgtttggtcaccaatattcccaataatttcatttttatgttcctcgatgacttgaatcgctgcttgtttttcttcatctgtcagttcatcattttggttaactaaatcttccatgtcatcaacttttctattaacggcattttcagcgtcaacactgcgaattaacgtatgttgcatctgatttgctaatgaatcgatatctgcttgagaaactcttttgtttaaaggtacattgttacggttttcatctaaaattgtttgtgcgcgtcttttaagatcattaaaaatatctaatgatgcaaatgtataatccgcttgttgaattcgtctatcgacttcggcttgcaatgcgtctttattcatgatgatatcaattgtatatggatttgtacttacagtatgactttcagcaggtgaattaataaaatcttgtgaatatgttttatacgttaatgtatcgttaaatgttactgttcttggtgttggcacattgttcacacgtagcttatacttcaaatccaatattttatcaggcattagtcgtgccggcgaattccctgtacctccaccagtacttttaattgtaataattcgatttgctgcgtcatacgtcacattcatatcattaatatcaacacctgaattaccgctaggaaaatctttagtcaatgaattatttacatattcaacaccttcaggtaattgaattttatatacaaaatcatctgtattgaatgaagcgccaaagttaccattattctttaatgacgttgtaactgtaaattctttattatttgttgctgttggctccattgtacgtctttcaacatagacatgtgacccagaatgaagaccgattgagtctacaaagtcatagtatttatatccatctcgtaattgataaataccacgtgcatctgttattgcgtcatttttaggtacaaattgaatttttagatgactaacattttcaggtacttttaataagcgccaaatcggaccataagcaactactttttcaccaataacagtatcgttatcagcatttttaatgattaaatttgtcataccttgatagtttttagtagtcatagtattaaattcaaagattaattcagaattcggatttactgttaatgttttctcgataccattaaaatcgccatgatcatttgtatcatttcctctaatacgacccaatgcaattacattgccttgcgcttgatagttcttggcatctcctgaatcaaacatgctcgttcttaccattgcatgactaaacacccctactttaccaccattaatcagtgtgtagcctggtaaattatcaacaacagttactgtaggcacagaacggttcgtacttggtctaatgttgttatcatcaaatgaaagcacttcgttaggtgcattttgtcctatattattggcattgggatcagttgttggcgtgtatggcgctgtaattgcaactggtgcactaccgtttcctgccgttggatctgctggtgtagccgttggatctgctggtgttgcattaggatctgttggcgcagcacgtctgcttctctttttcggtctattagatgcttcttcagcaatcgcaactaactctggcttatcagacgaatgacgaacatcttcttgaatttcttttaaagtcagatgacgcgctgaatcattgttatctgtattattaggcacgtttaatgtattgttatttgatgctaaattattatttgtattcgccgctggctctgttgctgttgaattagcattagaattattattattttgcgcaggcgacgcgctaggctgtattggagcaggcccgacttgatttgccacatcaacgttttgatgattagtcaatgcttgatttgttgatgtattgtctgttgcatgtgcattaggagtattttgcgaatcatttactatgtctcgattagtatcggcatttgtattttgtgagttgccaggtaatgcttgatttgaaccaccttgcacattatgatccgtagttaaagcttgtgcaccatttgggtttgaaagtaataaaactgtcccgattaaagtagagaatatccctactttatattttctaatactatatttatttttctttaacaaattcatttcgttttcctcctggttgtctattctctgctgtgttgtttagaattatgctaaaaatataagctccccgattatgtttataaccatattattttgtacaacattttaagttcactcaattttatcatcatcattttataaaataaagttttattttattacaatttagtttccgttttgtaattaatcacttaaaaaatcataacaagaacgctttagattgttttgtaacagaaagcaattcatagcaaaaaacaccaagcaaccgaaacgttacttggtgtcattacaaatgtaatattattttaaattatgtcactactttaaatactttttatttccaaaccttcatcgccccaagcgtgcatgccgccttcgacatttacggcatcaatgccatttgcctctaaatattctacaactttagcgcttcgaactccaccagcacatacaatatagtatgtctcttttttgttaaatgcatttaaattgtcgggaatggtatccattggaattaactttgcattaggtatatatcccattgctgtttcttcgtcagtacgaacatcaacaatttgaactggtttagattctaaaagtttggtttttaattcatctgtagtaattgacttcattttaaagtcctccttataacattatttagctacaatattgactaatttttgaggaacagcgatgactttcatgatgtctttaccttcaatactcgctttaacattgtcattagataaggcaatttcttgcatttcttcttttgatgtatctttagcaattttaattttagctctcaatttaccattaacttgaacaacgatttctacttcatcatctacaagtagtgcttcgtcataagttggccaaggttggtacgtaatagactcttcatgtcctaattttgaccataattcttcaccgatatgtggtgcaataggtgctaacattttaacgaagccttcaatgtaaggtttataaacttcatcaactttataacactcattaataaataccattaattgactaatagcagtattaaatcctaatgtttcaaagtcttctgttacctttttaacagtttggttataaactttatctaaagatttattatttgtagttactatttttgaacttaatgttccatcttcatttaccattaaacgccatacacgatctaagaatcgacgagacccatctaatcctttttcactccatgcaattgcagcatctaaaggtcccataaacatttcgtaaagacgtaaagtatctgccccatgagattgtactatatcatcaggattgattacatttcctttagatttactcatcttctcattaccttctcctaaaatcataccttggttaaataatttttggaaaggttcttttgtaggtacgatacctaaatcataaagtactttatgccaaaatcttgcatacaataagtgaagcactgcatgttctacgccaccgatatataaatcaacaggtaaccaatgttttaatctttcaggatctgctaacatattttcatttttaggatcgatgtaacgtaaataataccaacaactacctgcccattgtggcattgtatttgtttcacgacgccctttcatacctgttttttcatctacaacatttacaaatgaatcaatattagctagtggtgactcaccagtccctgatggcttgatttcatctgtttcaggtaacaacaatggtagctcttcttcaggaacagttgtcattgttccatcttcccaatgaatgacaggaattggttcgccccaataacgctgacgactgaataaccaatctcttaatttgtaattaactttcttttcgccagcaccttttttctctaataattgaatagctttagtaattgccgcttcattttctaaaccatcaagttcaccagaattaatatgtttaccttcaccagtgtatgccgcttcttcaacatttccaccttcaatgacttcaatgattggcaaatcaaactttttagcaaattcataatctctgtcatcatgcgctggtactgccataattgcaccagtaccatatgttgataatacataatcagcaatccaaatttgtactttttcaccagataaaggattaattgcatatgcaccagtaaacacacctgatttatcttttgctaaatctgtacgttctaaatcagactttttagaagcttctgtttgatacgctttcacttgatctttatattcatcagttgtaattgaatcaaccaatgcatgctcaggacttaagactaagaatgatgcaccatagattgtatctggtctagtcgtaaatacttctacttttccttccgaattatctacatcaaatgaaactttggcaccttctgaacgtccaatccagttacgttgcatatcttttaaagactcaggccaatctaaatcatctaaatctgctaataattgatctgcatattctgtaattttaagtacccattgtttcattggtttacgataaactgggtgaccgccacgttcagatacaccgtcaatcacttcttcgttagataagacagtacctaatgcaggacaccagttaactgcaacttcgtcaacgtatgctaaacctttgttatataactgtatgaaaatccactgtgtccatttatagtattctggatctgttgtattaacttcacgatcccaatcataactgaaccctaattctttaatttgtcgtttaaaagtttggatatttttctttgtaaattcacgtgggtcgttaccagtatctaaagcatattgctctgctggtaatccgaatgcatcccaccccatcggatgtaatacattatatccttgcattctcttatatcttgaaatgatatctgttgctgtatagccttcaggatgtccaacatgtaaaccagcacctgatgggtatggaaacatgtctaaagcataaaatttcttttgacctaagttatcatttgttttaaatgttttattttcgtcccaatagtcttgccatttcttttcaatttgattgtggttgtaattcaacacatttcctcctattcaataaaaaaagacacctctaactattctatttacatagggacgacatttgccgcgttaccaccctatttcacaaaaattgtgcactcattttaatagtaagagatgtcattcattcaatttaaaattaatacgatttacatttagtccttaacactagctctcagcatcactagctttctgtagaaaagctccaaacgaaattaaattatacaaattaatattatgttataacgacatttatttcaagtctataacgttaattctatttactcattatgcatctatttttttaggttgcgtattattctccttgaaaaccattaataatattaatgcaaatacaagtagtaccatcataccgataaacatcatgcgcatattaaatgcatcaactaatacaccaccaagaaatggaccgaatgcttttcctactgtagcagctgaattcacaaaaccttggtactgtccttgcttaccatctggcgctaactgattggctatagttggaactgcaggccatacaaacatttctccaaaagttaaaataatcataccgacaacaaatattgtaaagttttcggcaaaactcgtgacaaagaacgacaacataaaaatgatgatgccgacaaacatttgcttctttaagtttccttttaacagatagagaattggtttaattaatggttgtgctactaaaatcattattccgttaattgtccataaaacactatattgtgccattgaaatattaatcgattgtgtaaatgatgcgattgtagactcccattgaatatacgcaacccaacaaattgcaaacattgcacaaattagtactaatgaaataaatcttgctttattctttttaccagtaatatctaaatgagttggatatttaactttcgcattaatttcaatattaaattgcgttaccgcgacaagtgcaaacacaacatacataataagattggctaaaaagatatagttaaagctaaattctgcgacaaagccgcccattgcagcgccgacagcaacaccaatattttgcgctaagtatatcgcattaaacgtttgtcttccgccattcggccacactgctccagccattgcgtatatcgcaggaataatcattccgccaccaaagcctaacattacaagccatacagcataccaaggccacccgtgaaagaaattaagtagcgttgtactacaaagacaagtgaaagttccaattaaaatcgtcttgtatccacctaatttatcaaatagtgaaccacctaataagtttccaataaccatgccaaatgaatttatcattagcactaaaccagcaacagttaaactttttccaagttcttgtttcatataaattgtatttaaaggccacaaaaaactggaaccagtaatatttaacgccatgccaattactagccaccagactgatttaggtatattcatatttcatagttcctctctcttttttgtcaaactataataaacactataacattaaaatatgttaaaatctgtacttagaactctttttttatagaaaggaaaatgacttatgggcaatcatttccaatacgcttttgaaaacaaacgttatcacacatggaattaccatttaaaaaataaatttggacaaaaaatatttaaagttgcattggatggcgggtttgactgtcctaatcgtgatggcactgtagcacatggtggatgtacattttgttctgctgcaggtagtggagactttgcaggtaatcgtgcagattcaattgcagtacaatttaaagaaattaaggaaaagatgcatgagaaatggcacgaaggaaaatatattgcttattttcaggcatttacaaatacacatgcaccagttgaagtgttaaaagaaaaattcgaacctgtacttaaagaaccgggtgttgtgggattatctattggtacgcgtcctgactgtctaccagacgatgttgtcgaatatttagcagatttgaatcaacgaacatatttatgggttgaattgggactacaaacaatccatcaatcaacatctgatttaatcaatcgtgcccatgatatgcaaacttattatgatggcgtggcaaaattacgtaaacataatatcaatgtatgtacacacatcattaatggcttacctggcgaagactatgacatgatgatggctactgccaaagaagttgcacaaatggatgtacaaggtattaaaattcatttacttcatttgttaaaaggtacaccgatggtaaaacaatatgataaaggtttattaacttttatgactcaagaagaatacacaaacctagttgtagaccaattagaagtgattccccctgaaatgatcgttcaccgaattaccggtgatggtccaatagatatcatggtcggtccaatgtggagtgttaataaatgggaagtattaaatggcatcgacgctgaattagcacgtagaaattcttatcaaggcttgcgttacaagtctaaggtgaagcaatgaaattagaacgaatactccccttttcaaaaacacttattaaacaacatataacaccagaaagtattgttgtagacgcaacttgcggtaacggcaatgacactttatttttagccgaacaagtaccagaaggacatgtttatggtttcgacattcaagatttagctttggaaaatacacgtgataaagttaaggatttcaatcatgtttctttagtaaaagatggacatgaaaatattgaacatcatataaatgatgcacataaaggtcatattgatgcagccatttttaacctaggttatttgcctaaaggtgataaatctatcgtgacaaagcctgacacgacaatccaagctattaatgcgttattatctttaatgtcaaccgaaggtattatcgtattagttatctatcatggtcatagtgaaggccaacttgaaaagcaagctttgcttgattatttgagtactttggagcaaaagcatgcgcaagttttgaaatatcaatttttaaaccaacgtaatcatgctccattcatttgtgccatagaaaaaatttcttaaacatttgctgcgctatacttttttataatttaggattgagtagctaacatttgaaaaaaatatcaacgacaaaaagaggttttcaacttaatgaaaacctctttttatgctattaaacttacacagcaataattgcgtttaaactattttgcattgctgttgctctacttgcaatcgcatcactgatgaaattcaacaactctactttctcttgttgtaacttttcattgaaatgaataataactgttctttcatcgtcaacaggacgctctttgtaaatccattctaattcaactaaattattatacgttctagtacgcttatacggtttaacttcaacaaatctgtccatttctttaagcgtcatagaacctttttgccataaagttagtaaaattaaaatttcttctctagacattttgtactcgctttcaatctcgctgaaaattgagttaatgtcacccaaaagtgtttctaattgcaaaatcccaaatacagtatcgttatttacttttttcatgctatacatctcccaattaataatcacatatttagctaccatacaagtattaacaaacatcccaacaatcccaaaacttatatgtgctaacttatgcataaaactacaagtgtaaataaacttgctttctattcaattgtctaagttgaataaaattaaataagtataaaaaccaataatcactagagttaatatttagaaataagataatagtacataaaacaaatcactctattacatattaattttataatttatatacaaagaaaatatatcaatattaccattaaattgcaacaattctacatatatttcttcaaaaaagatacgcattgaatttttattacatataactctcatgaaaattgattaaactaaattaattagttacctttaaatttaacaaattaaatcaaaccgaatgagactaaattggttatttttcaagatatgatttgcataaatcaaaacatttcttacaaatcaaatgtgtataaaatgtgatatacattctcaaccttaaaaaagtttaaaaaaaaagatgagcatctactgtctcacctttttagaatattaaatttctacaatttcgtcatcttcaacaataaagcccattgtattgacgctattatttaagaaagtcagaatataacgcattacttcatcgcgttctggctcattgtgaacctcgtggtaaaaaccttgccaagctttaaaatataattcaggtgtttgatatttttctttaaactcatcaattgccctagtatcaacaattaaatccttcgttccatacattaatagtgttggcattggttgaatgtcatgaatatgagccatcgtatctttcatcgtctcattaattgtgttataccaatgatacgttgctttttttaacattaaaccatcgttaactgtttcttcaacaatttctaaattacgtgttaaatcttttggttctacaccaacattaaaacgtgtgtcttttgaaattttacctatatttgaaacaagtttatctttacgattttttccattcttttgaagttctagcataggagaaattaacatcatcccctcgattggcaattctactttttcaagtaaatttaataaaatcaaaccgccaagtcctacccctaatacataagtaggaattttatattcattagctatctttaaccagtctagcaaactttcgtgatacgtttgaaagttttcaatttgtcctttattagctcttgaagtttgaccttgaccaggcaaatctcccataatcacatgatagccatttcttcttaacatcgtaataacatatgcatatcttcccgtatgttctaatatattatgagcaataacaacgacgcctttcgcatcattttcagcttcccacttccacattattatactgcccctttttcattaatcttcaataacataattatagcaaattcactatgtagatttctatttatagtattattgttgtccatattattatatacaaatgaaatcaacatcaataatagtgtaattatacataattatttttaattgtttttgatgaaaacgctttctcgaatatttttttcatgctaaacttattgtaaacacaagggtttggaggagtagcaatggcactattaaagaatttttttatcggattatctaataatagttttttaaacaacgcagcaaaaaaagtgggcccacgtttgggtgccaataaagtcgttgccggaaatacaattccagagttaattaatacaatcgaatacttaaatgacaagaatatcgctgttacggtagacaatttaggggaatttgtcggtacagttgaagaaagtaatcatgctaaagaacaaattttaacaattatggacgcgcttcatcaacatggcgtaaaggcacatatgtctgttaaattgagtcagttaggtgcagaattcgacttagaattagcttaccaaaatttaagagagattttacttaaagcaaatacttacaataatatgcatataaatattgatactgaaaaatatgctagcctgcaacaaattgttcaagttttagatcgattaaaaggcgaatttagaaatgttggtactgtaattcaagcatatttatacgatagccatgaattagttgataagtaccaagatttacgattacgtttggttaaaggtgcatataaagaaaacgaatcaattgcatttcaatctaaggaagacgtagatgcaaattacatcaagataattgaacaacgtttgttaaacgcacgcaatttcacttcaattgcaacacatgaccatcgcatcattaatcatgtaaaacaatttatgaaagaaaatcacattgaaaaagatcgtatggaattccaaatgctctatggttttagatcagagttagcagaagaaattgcaaatgaaggatataatttcactatttatgcaccttatggcgatgattggtttgcgtattttatgagaagattagcagaacgcccacaaaacctttctcttgctgcaaaagaatttgtgaaacctgctggcttaaaacgtgttggcataattgcagctttaggagctacagttatgttatgtttaagtacaattaaaaaattatgccgtaaatagagcttggcataaacaataatttaggagtctggaacattaatcagtgttctaggctcctaaatattatattggcagttctgaatcatttataaatctttgattatgaactcacaacagcgctctatgcttttatagattttaataaattagccatttcaattgcacttactgctgcttcggcacctttattgccagctttcgtacctgctctttcaacagcttgttcaatactttcagtcgttaaaataccaaatatgactggtacattagtttgatcatttactttagaaacacctttcgcgacttcattacaaacataatcaaaatgagacgtagcaccgcgaattacgcatcctaatgtaattactgcatcataatttcctgatgaggctaattttttagctactaaaggaatttcaaacgcacccggaacaaatgcaacatcaatattgtcttcattaacatcatgtcgaatcaaagtatcttttgcaccttcaagtaatcttccagtgataaaatcattaaatcgactaactacgattgcaactttcaattcttttccaattaatttaccttcaaaattcatgttaaagtcctcctatattaaatgacccatttttatttttttcgtttccatataatcatgattatgtaccgtttctggtacgataacttcaattctttctgcaatatcaatgccatattgttttaatccttcgaatttacttggattattacttaataaattgatatgttcgatgttaaaatattttaaaatctgtgcagcaatatgataatctcgcaaatcttcatcaaaacctaatgctaaatttgcagttactgtatcatatccttgctcaattaattcatatgcgcgtaatttgtttaacaatcctatgccacgaccttcttgaggtagataaataatcatgccgccatgttcattgatatacttcatagacgattcaagttgagcaccacaatcacaacgttgactatggaaaatatcgcctgtaaggcacgcagaatgtaagcgtacattttcatgttgtcgaattgcaccttttgtcagtacaactatctcttcatctgtgtaagtcgctttaaaaccatacatatcaaatgttccgaaatctgtaggcattttcacttttgccttaaattcaatttctggttctaattttttacgatattcaattaaatcatcaatcgtaatcatctttaatttatgtttttctttaaacttttgtaaatcttgtcctttcgccatcgtgccgtcatcattcataatctcacaaatgacaccagcgggcttggcaccagtaagtttagctaaatcaacagccgcttcagtatgaccattacgagctaatacccctttatcttgtgctactaatggaaataaatgaccaggacgattaaaatctttagcttcactacttggatcaatgagctttttggcagtcaatgtacgttcataagcgctaattcctgttgttgtatctacatgatcaatactcactgtaaattgcgtaccaaagatgtcggagttatcatcaaccatttgtaccaaatccaaacgttgtgcaatatctttagacactggtgcgcatattaatccccttgcttctttcgccataaaattaatggtattatcgttcatccattcagtgaccgctactaaatcaccttcattttcacgattctcatcatctactacaataattgtttctccattttttaaagccattaaagcactgtcaatattatcgaattgcatgctacccctcctaaaaaccaaatgctcttaatttatctacagataattggtctttatccttatttaaaatattttcaacatatttaaacaaaacgtctgtttctaaatgtactttatctcctaattttttggatgataaaatcgttgaacgcctcgtttctggaataagatgaatgtcaaaactgttatcatgtttgtcaaataccgttagacttacaccatccacagtgatagacccttgtttcactaactgcttattaatatgttggctacattgaatcgtaataattttggcattggctgtttcatttatttttgaaactgttcctagttcatctacatgaccgaggacaaaatgtccaccaaacctaccgttaccactcatggcacgctctaaatttacttctgattgtcgcttaacatctgctaaataggttttattttcagtgcctttaattacttgtacagtaaaagatgtctgattaaaatcaatcactgttaaacatgcaccattaacactgatggaatcaccaatatgcatatctgccgtaatcttatgtgcttcgatttcaatcgtcctgactgattgacgaatttgaacacttttaacgacacctatttcttcaacgatgccagtaaacatgcatcatcacttctttcgtaaagttaatttgacattttgatttaataactcggaatgaacaatttcaaattggttcgcatctggtatctcaatcacatcatttgtttgataaaattgataatttccagatccgccaattaatttcggggcataatagagaataaatttgtctatataattagattggagaaattctgaagtagtggttggacctgcctcgactagcaaagttccaactcctcttttatataaattgtgaagaattgttgttaaatcacaagacttcaagtaaataatttcaatatgtgtttgattggttgttaaatttggattttcagtatatatccaaattggtgttgattcatcttgataaatttgctgattaaaatgaatattcccagacttagacaatattacttttatagggttttttccatcttgaatacgtgtagtatattgtggatcatctaattcaactgtatgtcttccagttaacactgcatcgtgtcgatgtcttaacttatagacatcttgtttaacctctttgttagtaatccattgactttgtccattatcattcgcttgtttaccatctaaacttgcagatactttcactgtaatttgtggcagttgctttgcttttgctttaaaaaagtcttggtataattgtgatgcacgttcatcatcaacgcattcaacctcaataccgtgatcccgtatcgtctcatcaccatgtgtatctaacgaattgtcttttgttgcgtaaactactttagctatcttacaatcaattattttgttaacacagggtggcgttgaaccaaaatgactacatggctctaacgtaatataaatcgtcgcaccttcagcattttgttgtgccatatcaagtgcttgaacctccgcatgcttgtcaccttttctcaagtgtgcaccaataccaacaatcctaccttctttaactacaacagcgccaacgggtggattaacacctgtttgaccttgtaccatatttgcaagttgaatcgcataatccataaattgactcaaatgatcacctctataaacaaaaatcctcacatcatgaattaagatgcaaggagaaaaatttatcgttaaataagcctatttgtacacatttttacaaatacgctacattatctttgtcgataattaacattctttctcccatccagactttaactgtcggctctagagtctcactagatcagccactaatacgaaacatattagcaggtcgcaggcttaatttactgccggttgggaatttcaccctgccccgaaagaattatatatgaaattgttatagattatttgagtacgtagtatgtcaactacatttaaaatgatactatatgttttctgaaaaaacaattaatgacggttttaatttaatataatctgagtactataggcatctcattgctatgattcttactaacagacattaaaatcaaaacctcaatgcgtctctatagagcgttctctttattatcttctagttacaaattattgattgtcacttcgctgttcttgctcattcgattctaaagcatcatataattgagatactgtatgcgcaacttgttctactatcattttcacaccatttcgtagtttattaacaccgtttgtcatttgacctatcgcaatcatatttgttaatgttccaaaccttggactaataacttgattggtttccggtatgatttgtatgcctcccattggatgtgcttgtacaatttgtctattttcaagatttttaattaattgatcatcttgatctaattcatttaaatgactttttgcacctgtcgcgttaatgacaacattatatatgtctactgattcttggtttttgtatgaaaaataatacaacttgccatcatgtttcacatcttctaaatcttttttcaaaattaaagacttattttctattaattcaataattagttcagcagttcttggaggcattggatttgaatttaattgaatcatctttgagtatttttgattaaattgatgttggtcttcaatgcttaagctattccatatccaatttaaattctctttcaaatattcaatgatactttggaaaatgcccatttctgttggacgcgctaaatcatacttcaaatctgcaatatgatttcctgtacgtctatgtactaatttttcaaaatcaatgtcatattcagcacattcttttaaaaataaagaaactaacgtatcaagcggtgcattgccgaaatgatgtttttttatgtcatttaatttgtctttagttaagtacttgaatgtcacgtctatcattgtacctcttacacttggtaaatttgcagaacgactcgtcatagtaattggtaatttcggatgatgagcagcaacataacgaacaacatctaaacttgcaaggcctgtaccaataatcgcaatatcgtccagttcatttacttcgtctaacgtattatatgttggataaggcgtagcgatatatccttttttgcccttcaagttatatggatcatggtaggcaaatgtaccacatgttaaaaatacataatcgtacgtttgccatgattgttctgaatttgtagtacatatgtaataagttaaattcgtttcatcgatattagaatttgtataaatctcttgaactttattataattagttgatatatttggatattttttcgtatacatagataaataagatttcatataatgtccgaatacaaatctcggtaaatatgcaggttcatcaaaattaaaatcagtttgttgtttataccacttccaaaattcagtctcatcatctaaatttaaactcatctttttcgaaggcatattaattagcagctcagaactatcattttgaaatggtacgccctgtcccatatttactttatcatcgtataaatctatatctaattgattaaatttcgggtgcttaactaactctctcaatacacttacaccagcagttcccatgccgattattgctacacgcatatatcatccatcctttagtcattttaaatattttcttttatctattacccatatttatagcaatttggtattttaataaaatttattaaggtaatctattatttcacttttacaaccactaaaccatttaaaacttttcatttaatatcaaatctagtgtttgtgttaaaatatttttaacaatttgccatattttatgaattcaccattgtcatacttcattacttcatcataattatgattcgttttaaagatgttcattcaatatcgacaacagcttatgtgttaaaatatttttaacgaggtgaattaaattgaaatttatagcaaagatattaatctcattagtaattctatttatgatttttagtcgtaaaaataaagcttcttaatcaatacccttgattacaaaataaattcaactaaggtgattggccatacactcaagatatggctaatcacctttttcaatgcagaataaagagtatattttgcaaaatcaatatttataatttatctttaatacccttttaatactaaaaccaaatttaaattacatagtcatatcgtgaaatataccaaagaaacatagacatttatctatatagatgataatctatttaacgtctaggaggtatgttatgacgtataaagaactagcaacatatttaaaagttttatcagattcaagcagattagaaatactagatttactttcttgtggagagttatgcgcttgtgatttgttagaacattttcaattctctcaacccacacttagctatcatatgaaagcattagtaaaaaccaacttagttacgacacgaaaaatcggaaataaacatttataccagcttaatcataatatttttgagtccgtaattaataacttgtcaaaagttcatacctctaaccaacgatgtatttgtcataaccttaagactggtgaatgctaatgatgacaactttagcgacattcatttttctagtaactttattatttgtattatggcaacctaaaggcctagatattggatttactgcattagcaggtgcctttattgctgttattactggtgttgtaagtttttccgatgttttcgaagtaacaggtatagtctggaatgccactttaacttttgtatcagtcattcttatttcattaatattagataaagttggattattcgaatggtcagctattcacatgcttcatgcttcaaaaggtagtggcctaaaaatgttcgtttatatcatattattgggtgccgtggttgctgcatttttcgcaaatgatggcgcagctttaatcttaacgcccattgtattagcaatggtaaaaaatataggttttagtaagcgggccatatttccatttattattgcaagtggttttattgctgatacaacgtctttacctttaatcgtgagcaatttggtcaatatcatttctgcagattactttaacattagtttctctcaatatcttagtagaatgattatccctaatttattctcgttattagctagccttctagttttgtggttatattttagaaaagcgattcctaaatcatttgatgcaaatcacataaaaaaacctatagatgccattaatgatttaaagctatttaaaatttcatggattgttctagttatattacttttcggctatctaatcagtgaatttactaaaattccggtatcaattttcaccggaatcattgcttttatatttctaatattggctcgtaaatcaaatgctgtaaatattaagcaagtcattaagggcgcaccttggaatatagtattattttcaattggtatgtatatcgtcgtattcggcttaagaaatgctggcattactttaatattagctaaaatattagaatatatttccaattacggtctatttagcactattttgggaatgggcttcatttcagcatttttatcatcaataatgaataatatgcctacagttttaatagatgcgattgctattggtcaatcaaatgtccatggcatgttaaaagaaggcctaatttatgcaaatgttatcggttctgatttaggtccaaaaattacaccgataggctctttagctacattactgtggttacacgtcttaacacaaaaagatgttaagatttcttggggcacatactttaaaactggtatcatcattacaattccagtactatttttcacacttttaggattatatctaacacttatactattttaagtaataaaaagacgctttctatttattgcgatagaaagcgtctttttgtacttgagcaagtcatatcataacttaactctaacaaattacttattcaaatgtttactgtcatctttatacacaaagtatttgaagtattttccttcagtcttcatgttcttataaaagtcagcgataattgttgcattactttctgcccacttaatatctgtagcatattgatgttctcctggattttttggattccatctcatactatacaatgtattttgatctgtgcttgataagaagtgcttatgaatgaaatcagcaccgcctgaaatagctttttcaggtgtatcccaaccatgctttttagcatattctgcacctgttttaattgggtctttatcaagagctcccactccatagaaattgtagtattttttaccatcaatttcgacaccattagctaattcacttttaactgcgccagtttctaataatgcatgtgaaattaaataaacttcgttaacgtgcttatctttagcagcttttaagaaatcatccgtatgtttcaataacgttggtctatcgactaacatacgtttaattctatttttatcaatcccttgatactttgataaatctaaaaattgatatttttgcttttcattatcgataaaagtaccgctatccattgcacttttaatttcagttgcagatgcatctctccatgcatcattctttttatttgatacctgttgactcgtataattatttatttgtttctttgctgcatcgtttaatgtaacatttaacttttcaatcttaatgtcggatttaacatgtttgaaaaatatctgatcggatatcattgagaaaaataaaaatgagacaacagcaaatatgacaacaagtcctattattccaaaaatagaacctttcttgtgtttattcatatccacacctcttaggtcattgttgttatacattcagtttgactacgataataaagtttaacattattaaaaccgtttaacaattttatctatgcattgttacatattcataaataaacagtaatgtaaatgaaacgttttaaacgatttatcaacattactttacgttgattcacgaatcataaatgttttatctttttgtataacctttgaaaacctttatatcaataatcttattattcacgtattaaaaaacaaaaaattctcttgttcgtttacttagtttcttttttataatccatcataataaaacttgctgcatttgatctatttttataatagtactgatttaaatcaattgtaccttcaatttgaccatcacgatacatcatttcattagtgaagttatttatcatcacgaaatcagcgcgatctcttataacatctaaatcgtcgtttcgtgcaaaaaaatgttctaaatttaaatgtgcgtaatccattgttacctcccgattacaaattttgttctatctactatttagcaaagtaataatacatcatatcacattaaattaattacttatgtcttatatttaacacttaatttagcgattacgcaaatgaatgatttttctaaatattttattctatctttatccggaaatatttgttatacgtataacttggagaatgactacttgaaatttaatgacgtatacaacaaacaccacaaaatcatacaccatcttttaaaaaaatataatattagctataattatgatgagtattatcaactactcttgataaaaatgtggcaattgagtcagatatataaaccctcaagcaatcaatctttatcctcttttttattcatgcgactaaacttttaccttatcgatctattcagacaacaaaaacgtttaaatgatatcattttatgtgaaaatcattcaccaatactaactgaacagccaacatactttaatgaatatgaccttcgtttacaagatgtttgtgccctactaaaccacagggaacgtcagtggcttatgctttatcttgaaggctataagcaatatgaaattgctgatattatgtcattatcaacttcaacaattaaattaattaaggcatcagttaagcgtaaatgccaacgtttttttaaatagatgcgacgtgtcgtgttgattaaaatgattaatactcttggaacgctcaataatatgcatttcatttatgcgaaccattttattattaactgattgaaaaggagtactatatttgcaagacatttctacaaaacacctactttatatccaaaccgcaacttcgaaccatcttgagacaaaatgtgtctttctgtaccatgaatacaatctcgaattccctattactaaagccattccttattatgctaaattgcattttacatcagcatcaattttaatcgatgcggcaaaaagcatactcaacattaacaagctggtgcctatttaccttaatccgaaaacgattcttttcccaataaaacaaaagcgtgcaccgatacaaacatatatcaatgcacactatataattggtatgacggaaatgggcaattcgactatgctccatttcaaaaatggcaaaacattagaagtcgatgaacccatgtctcttatttccaaaaaatgctatgaaagtttagcattgaagcatttcattgaaaatactaatgactattaaatttatgttctaacagtttctttgtaaaatatgatgttgtgatttttattaaatagatactaactaacattaataaaatcgccccaatgattgttaaaataacaaccgttgtcgacaattctactttagggttaacgaaaaattgcacaccagatagacttgtaattaatccaaataaaaacaaacctaataaagcaacgtatgcaaacatcatcaccactaatgttacaaagatgctataacttttagtttctttactacgaaatacattttctcttaagtacgtattagcaaaggtgattggcttattaaagttcacattgtccttgtcagtaatactagacaaccgttgatctaatgcctgtttttcatttttgttcaaaaaccataattgctttttaacctttttatcaaatgatactttattcataattaaggatttctctcctttataatattgacgtaattttaaacattagcgtcaattgaaagtgtattttatatattttacagaaatacatgcatcaaatctacaaaaattaactttgcaattttatttttagtaatttgacactgtataattgacaccgtttatattgcaaacaaatggttttagttaagtgtaatgatgcgcctttaaacatatctaagtttctcatataatgaaaatgaccataccaatgaaatgctttaatatttattttaaagatgatagaaaggattaaatatgcagaaattcaaggatttgttttatgatgatttatcagttgcacgtggaaattattttctaactttattatccgcattcttgattactattattctactaattggtttcgttgtcagtgatacacacatactttatggcgtgtttatagtgctcatcggtattgtgttattacggttattcaaaattaatttactctcatttaaaaaattaacaatgtcacaagtgatttatatcatcggtggtgcattgctaatttatgggttagatcatctttatttacattttcatgacgtaccgacaaatgaacaagaattagatcgagaattacaacatatgcctttgtatatgtctattgtcacaattgctattatccctgccattgtagaagaaatcgtttttcgaggcatgataataagagttgtatttagaaagcatttatttattggattagttgtgtctagtctagtgtttgcatcattgcatgaatcggatacttggattgggtacttaccttatttatattctggagtgatttttggcctaatatatttaaaaacaaagcgattagaagtcgttattttaatccactttataaataacctatcctcattactcattctgatatggggataatactagttgatataatacacaatgattgcccctcaacatgttattcacaaaacgatatgcaatacaaattaataatatactagcttttaaaacaataaaaaaccttgtataattaacttaattttcataaaaattaaacgtcaaactttattttaggagaattaatatgttttcgaggaataacaatatttttgttgatgatttgtctgtaacaaaggacaattatttaattgcagttttaaaaatgttgatcatttttttagtaattaattatggaacagacatcagttatgaccatgagtatgttgggctatttattatattactaggtgttgtacttcttaaagttttaaacatcaatttattatctttcaaaaaattaaaattccctcatatgctttatattatatttggatttttgttgatgtatggattagattacttatatgatacgttcgcaccgcctacattaaatgaaatattgatagatgaagagtctgaagatgcaccttaccacatagctctgcttagtactgctatcattccaccaattacagaagaaatcatctgtcgtggattgattatacgaattttattcagaaatcatcttttcttaggttttatagtttcaactgtattcttcacgctaatacatgaatcaaacacgctgattggttatcttccgtatttttattcaggtttaatttttggctatacttacttaaaaacaaaacgattagaggtaccgattttaatacattttatcaataacctcttagccatgtaacaataaaatcattaattattttgatatttacatgatgacaccaaagcttttacaaagtattaataggtgactttccaaatgttattgcatatttacgttctgtaattatatcaaaacaacaaaacatattaagtttagctatgaaaaaaatctatgacgatagatttttttcatagctattttttattgttatcgagcctatcccagactctctatactgttatattaacagtcattgactgaatgataataagcttttcaattatagaggccccaacatagagaatttcaaaaaagaaattctacaggcaatgaaatacatattaatttaaaattgactccaatatgaaaaacccccataagcacaatgcctatgagggtttaaatatatttatatattataaaatagaaagacctgaagattgaatatctttcgcaaagcctttaactgtatctactgataattcgttaatatcgcgacctaagtttgtattcacttttttcacaacatctgcagggcatgtaataatatctgcaccaatttcatcagcttgaatcacattgaataattcgcggcaacttgcccataataatttaacgccgtctttactatgcgtaacttttacagcctctttcattaatggtaatggatctacgcctgtatctgcaatacgtcctgcaaatactgaaacatatgttggcacaccttcagttactgcttcagttatttctttaacttgttcaattgtataaacagccgtaacgtttaatctcacattgtcagctgaaagttttttaattaaaggaatcgttgattcaccttttgtatttacaataggaattttaacaaatacattttcgccatattgttttaaaattgctgcttctttttccatagtttctaaatcgtctgcaaatacttcaaatgaaattgaagcatctggaatttctttcacagcttcttcagcaaaagctttgtaatctgttacgcccgctttcgccattaaactaggatttgttgtaaagccatccacttgtttgtttttataagctgctttcatttcttcaatatctgcaccatccgcaaatacttctacatttagtttagccatataatatagcctccttgattcttattaaaattttaacaacatctgcatgtctttttcttacaaccatttgtaaaaaatgatttttatttctttgttatataaaacatttatatcacgcttttataatatatagctaattttttgcctatatttcttaaaaatgactttagcaacattgtgtcaacaaggtaattaaactattgttttgtgattgtttatgatacgatatgtaaatgataaccatccaggaggtctagcatgtctcgttcaaaaaaatacttttacttatctagcttaatgattattttaagctttttctttaatacaaataacgttttcctaagtgggctttttaattcttttattaaattaatacttttctgcagtgttattaactcaattgtactaatattgtctataatttttgcagaacgttcaattaaatcactaaagcctgatgcagattggattagaattgcgagtaaaagtttgccttggattattctaatcgttattttagtacatatcttttcgattgttcacacattcggttttatttaaaaaagataaaatgtcaatgtagccttaatacaaaacaatacaatgtatcatgctaaaatgagtaaatccatttgatgacgttgttgcgtataaaaatattagattttcgaaatcataactatgcatctaatcgctatagttatacaacaagatataacatataatgaggtttgataatgcatcgacaatttttgtcgtcgcgttgccaaaacctcttttttaaattcaaactacttcttttcgaggtgaaccaaatgcaatatgtatatatttttatcggtggtgctttaggcgctttattacgttacctcatttcttttctgaatactgacggaggttttccaatcggaacactgatagccaatttgactggtgcttttgtaatgggattgctaacagccttaacaattgcatttttttcaaaccatccgacccttaaaaaagctattacgactggttttcttggtgctttaacgactttttcaacatttcaattagaattaatacatatgtttgatcatcaacaatttataactttactactatatgctgtaacaagttatgtctttggtattttgttatgttacgtcggtataaaactaggtggtggtttatcatgatatcaatcattttagtcatgattggcggcggtttgggtgcaattgctagaagtgccattactgattatttcaatcataaattcacttcaaagttacctatcgcaacattgatagtaaatcttgttggtagttttttaattggattaactataggcttatcaatttcaatctcatggttccctgcgttctttgttaccggttttttaggtggcttaacaactttctcaacattagccaaggaacttacactaatgatgacgccaaaatttaatattaacctttttctcaattattcacttttacaattcatcattggatttatagcttgttatattggctatcatatttaaaaataaaatgcttcattcagcaaataggtaaattacgacaccttcctgaacgaagcattttttaattttcatgcaaattttttagcaccagataatgcctatcaaaataaaacaatctttgttgccgtttaaataatgtgaatgtcaataaattctccaaactagtcgaaaataaaaacgttaagcaatatgtctattacctaacgttgacaatttatctgaccttttcatcagttgagcgattttaatctatccttcaaaagtttttggatcaggtccaattctcttatcttgatttaaaccatcaattcgcgtcatttgttcatctgataattcgaaatcaaatattcggaagttttcagagattctgtttggtgtcaccgatttagggattgtaaccactccatgctgcacattccatcttaaaacaacttgggcaggtgactttcctaattcttgagcaatgtctttaattgtctcatcatttaaaatttgtgcattcatcaatggtgaccaagattccatcacgatatgttgtgctgccaaatataatttcaatttatgttgcgttaaatatggatgatattcaacctgattaattacaggtttaattgacacttgtgccaacaaagcttccaaatgttcaggttcaaaattgctgacacctatatttttaactttattatttttatataaatcttccatacctttccatgtatcaaccattacggcttcgttcgtacctggccaatgtactagatacaaatctaagtattttaaacctaatctagataaactagcttcgtaggcagctgctacattttcacgaccaaaatcctcaaaatataattttgaagtaataaataagtcttctctagcaataccagttgattccaatccggcacgaatgccagcacctacttgttcttcattcccataaacttttgcggtatcaatactacgatatccttgttcaatggcatacttaacactttccatgcaattttcatcattttccacacgaaatgtccctaaaccaatttgtggcatcgtgtttccattataaaatgttttaacctccataaatatcgcctcacctttttgatgtattataccctgttatcataacaaatctgagttgaatacatgagaaaaaacacttagagcaatcaaccactaaaatgctagtaatatctctcaaatattaatcaaattgtaaaagtaattctgtttaatttatgacaaactaaaaaagccgaagtaacaacatatagtcatcacttcagcctaacatttaattgaatgattcaattttatccatcatttgttgtaagtcttccacgttgtattgaatacgaccatggaatacaaatttgttaaagaactcgtctaattgttcagcaccgacaagcactttgacagcactattttgattataatttgaaattgttacatcgccttcatttttaggattaaagtataaaattgaagtcggtgtatatttagcacctaaatgtttttgtaagtcttcagccaattgtttaattgcctcaatttgatctgaataatttacaaatgataatgaacgtttgtcatcattttgatccataacaatagtttgcggtctagatttatctaaatccaatgtatcaaatacttgttccataggtggtaaatctttaaattgaccgccacttataccattataaacatgaccttttaacaattgagaatcaataatataaagaccagttcttgttaatactaaatgactaattcgttcaatattattaaagccatcctttggtaaaaagatatttgccataatgtgcatatcttctggtcgaattcgtttttctttaactaatctttcacgaataccaattaatctcatgtccgttacatattcactatgatttttcgagaacaattttaatgcgtcaatctcacgatcttttgtactaaccatgtgattataatcttcttgttgttttgtaattgtctttttattttgaatacgctctttctctaaagcttcttcatgagactttttaatgttttgttcttgttgttcatacttttcttctgtttgtcgcttaacttttttcttactacctaaggcaactaagaaaaggacaaaaaagattaatgcaatgactactgcaataatgagtccaatgactaccggtgaagataaatccatcacaacaacgctcctttttaatatatgaataactttaattataatagaacagctaaagattttcgatacatattatcatttatataccgaaaatcttttatttagctatattcaattcatcttattattttactgcgtcttttaattcttccactttgtctaatttttcccatgggaataagacatctgtacgtccaaaatgaccataagcagcagtttgtttgtaaatcggttgtttcaaatcaagcattttaataatacctgcaggtcttaggtcaaagtgttttctaactgcttcgacaagttgcccttcagaaactttacctgttccaaatgtatcaattgcaattgacactggttctgcaacaccaatcgcatatgccaattgtacttcacattgatctgctaaacctgctgctacaatatttttagccacataacgtgcagcgtatgcagctgaacggtctacttttgtaggatctttaccgctaaagcatccgccaccatgacgtgcatagccaccgtacgtatcaacaatgattttacgtcctgttaatcctgcatcaccttgaggtccaccgattacaaagcgtcctgtaggattgatgtagaatttagtttgttcattaatcaagttttctggaacagttggataaatgacatgcgctttgatgtcttcttgaatttgttcaagtgtcacatcatcagcatgttgtgttgatacgacaatcgtatcaatacgtacagggttatcattttcatcatattcaacagtgacctgaactttaccgtctggtcgtaaataatttaacgtaccatctttacgcacatctgataaacgttttgccaattgatgtgataaataaattgctagaggcatatacgtctctgtttcattcgttgcgtaaccaaacattaaaccttggtcacctgcacctgttgcttcaatttcttcttcgctatctttatcacgatactctaatgctttatccacgccttgtgcaatgtcaggtgattgttcatcaatcgcagttaaaattgccattgtttcataatcataaccatattttgctcttgtgtatccaatttctttgattgtttctctaacaactttcggaatatcaacatatgttgttgtagaaatttcgccggcgatcaatgccatacctgttgtaacagttgtttcacaagctacacgtgcatttggatcgtcttttaaaatagcatctaatattgcatctgacacttggtcagcgattttatctgggtgtccttctgtaacagactctgaagtaaataatcgtttgttatttaacatagtttgctcctttaaatttatattacgaaaattctctctctgtgagctaaataaaaaagaccttctaactattaatatagagagaaggcctaatacgtccattcgctcttatcgttcagacctatttgtctgcaaacggtttggcacctttcttttataaaaaaagaggttgctgggtttcattgggtccatgtccctccaccactcaggataagagaatccgttaaaaataatactacctaattaatgaattaatgtcaatttttcacaaataaatttacagtaaaatattgtagattaattatgttaatgtgttatactaattaaatgtaaaggcttacatttaaattatcgctttggagggatttaggatgtcagtagacacatacactgaaacaactaaaattgacaaattactgaaaaaaccaacgtcacattttcaactttcgacgacacaactttataataaaatcttagacaataacgaaggggtattaacagaacttggtgctgttaatgcaagtactggaaaatatactggtcgttcgcctaaagacaaattttttgtctcagaaccttcatatagagataacattgactggggagaaattaatcaacctatcgatgaagaaactttcttgaagttataccataaagtactagactatttagataaaaaagatgaattatacgtatttaaaggctacgctggtagcgataaagatacaatgttaaaacttacagtcatcaatgaattagcatggcataatttatttgctaaaaatatgtttattagacctgaatcaaaagaagaagctacaaagattaaacctaacttcactatcgtttctgccccacattttaaagcagatccagaagttgatggtactaaatctgaaacctttgtcattatttcatttaaacacaaagtcattttaatcggcggtactgaatacgctggtgaaatgaaaaaaggtatcttctctgtaatgaattatctcttaccgatgcaagatattatgagcatgcattgctcagcaaacgttggtgaaaaaggcgatgttgcattattctttggtctatctggcacaggtaaaacaaccttatcggctgacccacaccgtaaactaatcggtgatgatgaacacggctggaataaaaacggggtctttaatatcgaaggtggctgctatgcaaaagcaattaatctttccaaagaaaaagaaccacagatttttgacgcaatcaaatatggtgcaattttagagaacactgtagttgcagaagatggttcagtggactttgaagacaatcgttatacagaaaacacgcgtgccgcttatccaattaatcacattgacaatattgtagtaccatctaaagcagcacatccaaatacaattattttcttaactgcggatgcatttggtgttattccaccgatttcaaagttaaataaagaccaagcaatgtatcatttcttgagtggtttcacttctaaattagctggcacagagcgtggtgtgacagaacctgaaccatcattctcaacatgtttcggcgcaccgttcttcccgttacaccctactgtttacgctgatttattaggtgaacttatcgatttacatgatgttgatgtttatcttgttaatactggatggactggtggaaaatatggtgtaggacgtagaatcagcttacattacacacgtcaaatggtaaaccaagcgatttctggcaaattgaaaaatgcagaatatacaaaggatagtacgtttggtttaagcattcctgtagaaattgaagatgtaccgaaaactattttaaatccaattaatgcttggagcgacaaagagaaatataaaacacaagcagaagatttaattcaacgttttgaaaagaacttcgaaaaatttggtgaaaaagttgaacatattgccgaaaaaggtagcttcaacaaataaatttaaatactaattaaagagccaaccgctgttaaattttaacaatggttggctcctcttattttatatggtaaaaatttataggcaattttattacaacaatcacatttaaggtgaccttcatgccaaactcacatcactcattcaatggaagcagcacgtcttcacataaagtaccgattccttacgctatgcatgttgccccactttgcataaagtaccgattcctcactcaacgtatatcacacatctccaaagattgatagttcccatgcgcacaccacgtttcatactacctatgcaactcaacttggttcataaattctttaatataagtcaatgtttcaaccatcgctggtggtcttggcacatgtccttctgccatttgataaaatgtttcatgcatggcaccttttaactctagttgatccgctaaataatacgcatgatgaataccaacttgctggtctttccctccatgtacaattaatattgctggactgttttcattaatgtttggaatcgcttggcgtgcctcatatgctgctcgatcttttttcggatgaccaatcattctacgtaacatccctcttaaatcaacgcgctcttcatacatcaaatcaatatctgagactccaccccagatgatataactatttacaggtaagtcttgaaacgtcaacaacccttgtagtccacctcttgaaaaaccaaccatatgaataaaagcttgcggatatttatcatgtagcaacctcaataattcagtcacatcatttaaatcgccacgataaaattcatctttaccttcactcccattgttacctcggtagtatggcccaatcactaaagtttgactatctgaaaattgcattaatctacctgcgcgcacacgtcctacttggcctttgccacctcgcaaatatactacaatgcgttttacttcatgatgtggtgtcatcattaaagcttttacttgtaaatcatctgacaaatatgtaatttcttcgaattgatgcgtaaaagattcaattggcattcgtttacgtttgataaaatccaagtgattgcaccctctctacgcattttaaaatggtactatcttgcagtaagaaactccgttgtgcgagttcaatatcattgatacagttaaacaacactggccctgctgtttctaaataatcgttcttgcttaccaatgattcaacttcgataaaatatacatcttttacaaaatcagtttgatcatgtgtttcaatggtatattgcgctatgtaatgaatatttttaactttggcgcctgtttcttcatataattcacgggtaattgcttcagcactactttccccgcgttcccttttaccaccaggaaattcaataccccgtaaattatgtttggtaaaaagcaattgatttttaaacgttggaatagctagcacatgattgccatctgctatctcattatcctttttaaatgtcaaattaacttgacgattatctttatccctaaacttcacgcgcatcacatccctacattgtatgttaatataatagttaattactatcgttggaggcattaattatgaaaaagatattcttggcgatgattcatttttatcaacgtttcatttcgccactcactccaccaacttgtcgtttttatccaacatgttcagagtacactagagaagcgattcaataccacggtgctttcaaaggcctttatttaggcatccgtcgtattttaaaatgtcatccgcttcataaaggtggctttgacccagttccgttaaaaaaagacaagtcagcaagcaagcattcacataaacataaccattaatatggttgtaattgagttatatccactaaaggggggcgaaattcgagtcgcccctcttttaatatgcctgaatgcgccaccacatcttgttcaaaataataacctgctggtgtaacatctcctggataatcacctttacgagcaagcatcgctgtaaaataacggcttaaaccatattcatacatgccgccaacaaccacttttacaccatgacttttcaaagtatcaattgccgtttgcactttatcaatgccacctagacgaaatggttttaatacaacaactttcacattgtataattttatcaaattaattatggccgacagtgacgtcgccttttcatcaagagcaattggaggtattgttccatccactacgtcatcaagcattgagatatctgtaaatggctcttcgatataaagaacctgttcacgcgctaataactgtaactgtgtaaaatcttgacgattcaaggattcatttgcatctataaccaattgaaagtggaagtctaattcccgtaacactctaatttgatgcatgatttgaggcgtccattttaatttaattctggtcggctttgttgctttcaatgactctagttgtttatttgataagccgctcgctgtcgctccatatgctactgaaaatgaaagcagtacatgaaacatttgatacaatgccatgacaatagttgcccttgcagcaggcgtattttccaatgaatctactagttttagtgcagcttcatacgtttcaaatgatttattcctattatcttcgaaccattgctcaattacatgtttcactgacgcaattgtttcatgatcataccaatctgtttgaaaagcgttacattccccgaaatatgcatttcctttatcatcattcaattcgataaacaaacaatcacgatgcgttaaagtgactttcggtgttacaatttgtgacttaaatggctcactatatttataaaaatgcaaagctgtcaacttcatcaaatcatcctctatacaacttatttctttgtaatttacctgttgatgtataaggtaaagtatcaaccttttcaaagtgtttcggtactttatatttcgctaaatgttgtgataaatatgcaatcaattgtgcctttgaaatgttactttcactgacaaaatataatttaggtacttgtccccaagtatcatcaggatgccctacacatactgcgtcaatgatacctggaaattgcttcgctaccgtttcaatttgatatggataaatattttcaccgccactaataattaaatctttacgtctgtcataaatcatgacataaccttcatgatctatttcagcaatgtcacccgtattaaaataaccattttcaaacgtacccgttaaatctgttggatacaaatatccattcatcacattggcgcctttaatcattaattctccatgaccttttttattaggatttttaatttttacgtctacattggcacttggcattcctacagtgtcaggacgtgcatgcaacatttccggtgttgctgttaaaaattgcgaacatgtctcagtcatgccaaatgaattataaattggcaggttatattgtaatgccgtctctatcatactggcagatagtttagcaccgccgagtaatattttttgtaaatcataaggttcatgtaaaccttgttgcataagccaatttaaagtttgtggcacaagcgaaatgtgtgtgatgcgttcattttttatcatcgttaaaatttgttcggcattgaatttatcaacaatgcgcacagtaaatccttcaataacagctcttaaaagtacactgagacccgaaatatgataaatcggcaagacagatagccaattagtatcacgatcaaatcccaagctctctttacatccgattgcactggcataatgattacgaaacgtttgcggcaccgctttttgaggaccagttgtccctgatgtaaacataatcgatgcaatgtcatctaaattaaatgatgtatttaatatgttggacggcgaatctttcggcaccacagtttcattcgatgtatcatattggatacccattgtattgtccaacaaaccgttcgttgtaatatccgttccagcgaattcaatatcatccagcgatacaatttgaaaccctcgcaattccagtggcaaggtgcaaaaaatcaattgtacatcgattgacctcatctgattcgtcatctcattaggtgtcaaccttgtattaatcatcgcaatttcaatatttgccaaccaacatgcatgtattaaaatgattgattgaatcgaattatctatgtatagcccgacacgagattgttgataagccttgagccttttagccaatagactcgcttcacagtataaattttgataagtataagattcttgaccgtctgttatcgcaatatgatgtccattttgttgtgcttgtttatataaccaaaagtccatgcgctattcctccaaaatcatttacattataattataacgattttatgacattctagcagtggttatgtttaaaaatataaaaaagtagacgaattgatgcattgatatgattgttataatgctcaatacatatcgttatatcattcgtctactattatcagttatttttatttaattttagtgttattctgtcattctgatgtggtgatttatccattgttgccacatcatctgcaatgtcaatcggtctatgattcatatcttgtaatgcacttaaatgaaatagttcatcatctaaattttcaatgagatatacataatatgttaccttgtcctttttatattttaacgttttccaaaagtccggcttgcaattcaatacattatccggaatatattcaataaataagtaacgtttgctgcctactttatctacgaaatattttacagtgcctttttctatacctcttatatgtgcatagtctgctgaaaagtaaattctacctattatttcattatgttgttgtatttcaaatcgttggcctactattttattgtttgtgccacaactacttaaaaaaatcagtagatatagcattaaacatattttcatccccttgaattttaaaaactttttcaaaagcaacacctctaaaaataattacactatattatatcaaattaaatttattattttattaaatgatattgtcatgttcgtgtcattttaagcagtaatacaactttacaattattaaattagcattcctacaatccaaaaatatttttaaagttttgaaaaaaattaaagtatttccactactaatttggtaaaatatgattatgtgatatagtgaaagcgttttacacttaataactccctcttaaatgcatccaggttttatgtagtaaatcatgaaaataacatataaatatagaggagatttacctttgaatacagagaacaacaagaatcaaaaccaatctgctaaaaattctgaaagacgtggcatgttaaaaggatgcggcggttgccttatttcttttattatattaattatcttattatcagcctgttcaatgatgtttagtaataatgacaattccactagtaatcaatcatcaaaaacgcaattaactcaaaaagacgaagataaaagtgaaaatatgcctgaagaaaaatcagaatcagaaacagataaggatttacaatcaaccgaagaagtacccgcaaatgaaaatactgaaaataatcaacatgaaattgatgaaataacaacaacagatcaatcagatgatgaaattaacacaccaaacgttgcagaagaagaatcacaagatgacttgaaagatgatttaaaagaaaagcaacaaccaagtgaccatcatcaatccacgcaacctaagacttcaccatcaactgaaacaaacaagcaacaatcatttgctaattgtaagcaacttagacaagtatatccgaatggtgtcactgccgatcatccagcatatcgaccacatttagatagagataaagataaacgtgcatgtgaacctgataaatattaaacaacaagcgaattgaattcaaattgtatttagctttatgcactaatcacatagtaaataatgagggagattttttaggcatgagcaatcaattcaaaagcgaagaagagcgaagacaatgggaacaattccaagctttccaaaatcaacaaaaccaacagaaccagcaatacggacaaaagaaatctaaaaaaggatggttctggggctgtggtggttgtctagtattattcattttaattatcatcggtatttcagcttgtacagctggtattacaggtaaccttggcggaaatagttctaaagaaacgaacaaaacccataaaatcggtgaaactgttaaaaatggcgaccttgaagtcactgtaaattcagtggaaactatgaaatctgtaggaccatctcttgcaccaacaaacgctaaaggtatatttgtcgttgctgatgtgacgattaaaaacaaaggtaaagaagcgttaacaattgatagttcaatgtttaagctaaaatccggtgataaaacatttgaagcagataatacaggttcaatgtctgctaatcaaagtgacaatggtagtatagaaaattcatttttcttacagcgtataaatccagatagcactgctcaaggtaaaattgttttcgatgtgtcagaaaacatagccaacgcaaaagataaaaaattagaagttatttctagtttatttagcgtcaagaagattacatttgatttatccgatgctaaaaaaacatcaaaagctaaaaaagacaagcaagatacagaagtagctgttgcgagttcaaatagcgataatgtaagttatgaagcttcggctactacacctgctacaacttctagtgcggatactgattctgaagatagcgaaaagtctagtaaagatgaggataagcagaatgcgtctaaaagtgataattctagtgtagaaaaaagtgaatctaatgaggaaactgctcctgtagagcccatgccccatagcaaacctaccactagtgaagcacctcctagccaaaatattcacaatgaagatagcatgtacgacgcttcaacagaataaaatttcagggtagctcggctacccttcttttacggaaaaattaattatacataatcaaatcaaggagataaaaaaatgaaattcaaagctatcgttgcaatcacattatcattgtcactattaaccgcctgtggtgctaatcaacataaagaaaatagtagtaaatcaaatgacactaataaaaagacgcaacaaactgataacactacacagtcaaatacagaaaagcaaatgactccacaagaagccgaagatatcgttcgaaacgattacaaagcaagaggtgctaacgaaaatcaaacattaaattataaaacaaatcttgaacgaagtaatgaacatgaatattatgttgaacatctagtccgcgatgcagttggcacaccattaaaacgttgcgctattgttaatcgacacaatggtacgattattaatatttttgatgatatgtcagaaaaagataaagaagaatttgaagcatttaaaaagagaagccctaaatacaacccaggtatgaatgatcaagctgaaatggataatgagtcggaagacattcaacatcatgatattgacaataacaaagccattcaaaatgacttaccagatcaaaaagtcgatgataaaaacgataaaaatgctgttaataaagaagaaaaacacgataaccgtgaaaataattcagcagaaactaaagttaaataagggtatactttgattaatcgtaatttttaggagaaccgctatgataacatttgaaaatatacaacaacttgaaaaatacaccttaatgactatgcatggtctttttaatcaacttaaactcggtattatttcaatcgacaatgcagagcatacgctctttacaccttatatgatggaaacactctctaccctaggtgtgaaaccagacattatcgatttaattcacaaagggacagagttagaagacttttcagcatttaatttatcaattgatgatacagttacagtctgtttacaaagaactgaagaactattaaaacaatacaaaaatgtagaattcaatgacaaaatattaatcaattggcgcattatgcaagagaaatagacatataaaagtagaacctaactatgtggatattgattttattctttctaaattacaagtatttcattttataaagtttgaaaagaggtttattgaaatggagaaaaacgaatatacagctaaatataatgaatatagtcaattattagacgctacttactcgcaagctgtagcataccttttaaataaatatggcgctgtaaccgatgactattataaggaaaaatcatacacacgatttttaaatggagaaatcaaaagtatttcaaaaggaaaatacactagagctagcgaaggattatattgtcatcacataagcgaggacaaattccaaaacttatctgacctaagattcatttccgaatttaagtactcatacaattatcaaaagaaagaaaacttagtttactgcgatttaatcgagcatttaattttacatgcaattattacaaaagaatccaatggccaatttggtgtggctggattatgtcaaatgatcaaaccaacagtcattgattggtacattggcgaatataatccaaaaccagcatggatgcaagccaccaaagcacgtgcctatttgcctggaatattagtagagaaattactcattaaaattgacgatatgttaaaaggcatagaaatatatgatttccttgagtctagataaatgattaatggagatttattttttgctgttgagattttgttatagatgtttaaacctgtaattaaatatattttataaaaatagaccacgcatacctctctataaacggacaatgtttataaatgagtttgcatggtcttgaattgtattagttttcttttagttttaataaatcgactagattttctgatatattatttttattaatagtacgattatttgtttgatttgatagaaaattagattgaatataacctatatgtctgtatacgtcagggaataattcactttcaacataatgatactgttttaatttctcccttaattctttacaaatctcaggccttaaatattcactagtcaagatttcctcttttttcaaccttgcatctaaatatagttttttcttttttaagtcttccatttctttatctattttaataacgctttcatcttttaagattcgtttaattaaatattccaattcctctttgtaatcattagatttttcactatccatgtcatgttcagttttcatagttaaattgcgtattcttttgaggtcttctttaattctactcttatgatttttcaatttctcttctctagttatttttagtttttgaaaagcagattgcgtttgatttaactccctttttaatttttctttatagtcatatgaaaaatttaactttaaacgaactagaggtattttattaattttatctctatttacattttgttcattctgaaaaatcaatagcttttcgaagttaaaaaacgcacccttttgagctattattcttttgtttttactaatcatttttactcttgaaaacaaattttgttcgctgtgtattttaggattgatattatacatgtctaaggttgcattgttaaacacttgtgagttagaagttaaaaataggagcgctataaaggggttttcagtaatatcaattaatgtagttcttagcccataatgttgtaaataagccatattgttttctctttttttaaaatcttctgctttatattcttttttatttaagcacgtatactctattaaatctgggtacttataagccatatcttcgtatatattctcaaactctttttttaaatcatctattatatcatttcttaataatcctgctttcattggccaatcatttgcttgacctctataataattcgtggttgaagtatcatcatataatatttcaaaagtttggattaattctttatacaagtaaaataatttccattcttttttaccattaaaattataattatttagacgttcattcaataaatatatactgtctctgtatgattctaattttggatcataatgattcaatttcttacaagtaattgaatcaatactatataatacttcattactttcctttatttctgatattttaaggttaatgtctacatgtaaaacgttgaaaaaatctttttcttcataaattttatcgaaatttaaatataaatatttagtattcattatttatccaaccctaaattataaagtctaatcccagctgctattttagaaacttccaacttaattgcaatatagttaattaactcttctctttctgaaattgataaaccagaagttaaattaatattattttccttgtaaaacttatatactaaagcttccatttgctttttgggcattagtaaattagctgaaaagtcattagccaccctttcttcaatcatttcttcagtgtcatatgcataactattatttctatatttgattttatttttatgattgtgtaaaaaatgtcctatttcatgggcaattgtaaatctttttctattactagaatgatttttatttacataaatagttctttcatcaatataacccgaaacatcatcatccaaatcttcatactgaatttttaaatccagtaatgcggtcactttatttaaatcaattgcaaaattatcagaagtgatataaagttccttttctttcccctgtatatatggtttaagcagattaagtatgtcatcttctaatacatcttcataataaactttgtcaatggcagtcataaaaatcgcctcctaaaagatattgttaatcttctctatctattaattatattttatattctaaagcttaaaataaccagtctaactttcattattttagtcactaattaaatatgcgcatatctttacttacatttattgttttaatcactaaaattaataataaaatattttttcactgtacaaccgaatctaatccaacgatcccgaaaagaagaacaacggtggctcggcttcatattcatttttgtctaagtgttctttttcaattatttcatccactgttaatcggtctttagcatctttctctttcaataatcgccctattttttcttccttatatcctatgctactattaaactgatttccttcatctcctgtatttatatatgcctgaaatttatattgtttatcattatttatatatcctttaataaagtaagcattcacagggcttttttgaaactttgttattttcatagacttatagtgattcaggttatgcttaaaatataaatcgattcgcttttcttgtgtctcaatataatgttcttttttacttttgtgaaacgcgtatgcaataacaattagtactattaataatgcaacaactaccacaaatacatatctctttttcattttaacccccatagtttagtatttatttcttatagattttagatttcaaaaaacaattcactttgacatgctatcttttttctatgttccgtttacgcccctcatgaaacgttgtttcaaaatacttttaaaaattatttgcttgacataattataaatacataaaataacgctgttatatatgggtttataaaatgtaggaaaatggcgaaatgaaaatgctgtttttcctaacatcaaagatgttaaatcatactcgcgtataatttcattccttggcttaccattttcatataatctaaccatttataacttaaactctgaactaaatgttcttctttcttaaattaacaaaatctactatcatagaatttgtccaattagatgatataatagtagagtcgcctatctctcaggcgtcaatttagacgcagagaggaggtgtataaggtgatgcttattttcgttcacatcatagcaccagtcatcagtggctgtgccattgcgtttttttcttattggctaagtagacgcaatacaaaataggtgacatatagccgcaccaataaaaatcccctcactaccgcaaatagtgaggggattggtgtataagtaaatacttattttcgttatctcaattatactgctaatttttctttttgtaaaatatgcaaggttttaaagagaaacatcaagaactaaagagtgctctatgccaaattggactgatgcgttcaatatcggaagttaggcaactaaacattgcttaacttcctttttactttttggagcgtaaagttttaaacataataatattcgattgcgcaaatgattgtaacttccataaccaaaatttgtatgttatgtaatgattttttaaaatactcttgtcctttaatgattgtgaggataataataatttttattacaccatacaaccgaatctaatccagtgatcctgaaaagaaaaacaacggtggttccgcttcatattcacttttatctaagtgttcatttttaattatttgatcgacggttttccaagtttttacttcttgctcttttaatagttttccaagtttttcttcgtcatatcctatatctctttgaaattgctttctaccacctacattaataaaagcttggaattcatagtctttattgttatttatataaccacctataaaataactgtccattggcgactttttaaatctcgttactttaagtgacttataatgattcaggttatacttaaaaaataaatctattctcttttcttgtgtttcaatgtaatggtcttttttttgtttattatgtgcatatgaaataactatcatacctattaaaattacactaactattattaaaatatatttcttattcatcactctaatctccctgaaaagaagaacagtggtggttctgcttcatattcacttttatccaagtgttctttttttataatatctttaggttttaattcatttttatggtctttttctttaaataatttaccaaatgtcttatcatcgtatcctatgctatcttcaaattgatgattgtcagttacagagatgagaactttaaaatcataatttttgttgtgattaacatatccatccacaatatagccacccataggcgtctttttaaaactagtaactttcatagagctataattattaaggttatacttaaaatataaatttattcgtttttcttgcgtctcaatgtaatggtctttagttttcttattgtgcgtataagcaatgactagcagtcctattaaaattactataagtaatattaaaatatatttctttttcatcactctaatctccccgaaaagaagaataaaggtgattccgcttcatattcatttttgtctaagtgttctttttcaattatttcatcgacagagagtttatatttaggatctttttctttgaataatttgcctaatttatcttcatggtaaccaatatctttctgatattgattatcgcttcccggatctatacttgcttggaatttatattttttatcatcatttatataacctataatgaaatacccacccatcggagttttatggaaatctgtcaccttcatatttttataattgttaagattatgcttaaaatacaaatctatccgcttttcttgtgtctcaatgtaatggtctttttttgcttattatgcgcatatgcaataataattaggcctattaatattgcaacaactaccacaaatacatatctctttttcattttaatcccctagtgtagtatttatttcttatagattttagatttcaaaaaccaatttactttgacatgctatctttttctatgttcaacgcctctcatgattcgttgtttcaaaataccttttaaaaattacttgcttgacatagtattaaatacataaagtcgcgctgatttgcttttcgtattatgtataaaatagcaatcttattctaaattaatatctttttaagttcacttatcattttattacttaaatcaaaatttgtctcttttctaacattttactttacatcaattttaattactttaaatattgtataaattaattatttaaaatgctataatcgataagattattaatatttaattttccaattttaatttctttacatttttagatattaaataaatctcatggtgactgatggtttccatgcatcaacgaatttcccaatcctttggaaagttgaatcattaattaatcctaatatcaattgcacacacgcaaaaaaggagacatgtcaatgacaaataaaatgaagaaatggcaaaaattatccaccattacgttattaatgaccggagtgattgctttaaataatggtgaatttagaaatgttgataaacatcaaatcgctgtggctgatacgaatgttcaaacgccagattatgaaaaattgaagaagacgtggctcgacgttaactacggttatgatcagtatgatgagaataatcaagatatgaagaagaagtttgatgctaaagaaaaagaagccaagaagttacttgatgacatgaaaactgatacgaatagaacatatttgtggtcaggagctgaaaaccttgaaactaattcttctcacatgacaaaaacctatcgtaatatcgagaaaatcgcagaagcaatgcaacataagaatacggtattaaaaacagttgaaaacaagttgaaaataaaagaagccctagattggatgcacaaaaatgtttatggcaagaatccttctcaaaaagtcgaggatttaactaaaaatcgtaaggggcaaactacacccaagaataactcattgaattggtgggattatgaaattggtacgccaagagcattaacaaatacactacttctaatggatgatatgctcactaaagatgaaatgaaaaattattcaaaacctattagtacatatgcaccatccagtgacaaaattttatcttctgttggtgaatcagaagatgctaaaggtggaaatttagtggacatttctaaagtaaaacttttagaaagtgttattgaagaagatgtagatatgttgaaaaagtctatagattcttttaataaagtgttcacttatgttcaagattctgccactggtaaaggtcgcaatggattctataaagatggctcttacattgatcatcaagatgtcccttacactggtgcttatggtgttgtactattagagggtatttctcaaatgatgccgatgataaaagaatctccttttaaaactacacaagataatgctacattaagcaattggattgacgaagggtttatgccattaatctataaaggtgaaatgatggatttatcacgaggtagagctatcagtcgtgaaaatgaaacgagtcatacagcgtcagcgactgtaatgaaatcattgttgagattgaatgataccatggatgattcaacaaaaactagatataagcaaatcgttaaaacttctgttaattctgattcaagttacaaccaaaataattatttaaattcatattcagacatagctaaaatgaaaaagttaatgaatgatagtactatttctaaaaacgatttaacacagcaacttaaaatatataatgacatggatcgtgtcacctatcacaataaagacctggactttgcatttggtttaagtatgacatcgaaaaacatcgcacgatacgaaaatatcaacggagagaacttaaaaggttggcacaccggtgcaggcatgtcttatttatataacagcgatgtcaaacactatcgcgataacttctgggcaacagccgatatgacttgtcttccaggcactactactttaaatgatatgccatctactaatactaagaatgataaatcttttgttggcgggacaaaattaaataataaatacgcaagcatcggtatggattttgaaaatcaggacaaaactttaactgccaaaaaatcatatttcatattaaacgataaaattgtcttcttaggaactggcattaaaagtactgattcatcaaagaatccagttacaagtgttgaaaatcgcaaagcaaatgggtataaattatttaaagatgatattgaaattaccacttcagatgttaatgctcaggaaacccattcagtctttttagagtccaacgatactaaaaagaacattggttatcatttcttagacaagccaaaaataactgtaaaaaaagaaagtcatactggtaagtggagtgaaattaataaaagtcaaaaaaaagatgacaaaaaagatgagtattatgaagtaactcaaacacataatacatctgacagtaaatatgcatatgttttgtatcctggtttatcaaaaagtgattttaaatcgaagaataataatgtaagtattgttaaacaagatgaagattttcatgtgataaaagataatgatggcgtatttgctggggttaattatagtgataatactaaatcttttgatataaacggaattactgttgaattaaaagaaaaaggcatgtttgtaattaaaaagaaagatgataaagcatataaatgtagcttctataatcctgaaactacaaataccgcttcaaatatagaatcaaaaatttttattaaaggttacaccataactaataaaagtgtcacaaactctaatgatgctggtgtaaactttgaattaactaaataattaagaaaatctcggcactataacatttttatagtgtcgagattttataagcattgcaagattttatatcatagttaaagtcatctattgatttatatatttttgtttcatcacaatatgaacaattatttattggacgtatttagctctttctttatttcagaaactgacttaggatttttaataaattttctacccaattcatctgtataagaaatatcaatatcaaattgaaaatcatcaatagatcttatgccagctgtaaatgataactttctatcattatttatataaccactaatagaatagccatccattgggttttctttacaattagtaaagcttatatttttataacctttcacattgtgcttcatataaatcgttattctttctttttgttcatcataatatttcttttcgtcgtatttcatcttcaaaaagattccgcctagaatcaatattaaaattataattacaatcataagagattttttattcaaaaaatcaatctccttttcactggacttattgacaaacattttaaataaattaagcatactgagttttacgatgattgtataaacgttgcaaatcatatgactgttggttttaacattagtcaatttttctttcttataatcttaaatcatgatcaggtttactttaaaatttaaataattatatttttcatccattctatccataacatttattcaattggacctgaaaagaaaaataacggtggatcggcttcatattcatttttgtccaagtgttctttttcaattatttcatcgactgagagtttatatttagggtctttttctttaaataatttgcctaatttatcatcatggtaaccaatatttttctgatattgattattgcttcccgaatctatacttgcttggaatttatattttttatcatcatttatataacctacaatgaaatacccacccattggagttttatggaaatctgtcactttcatatttttataattatttaagttatgtttaaaaaacaaatcaattcttttttcttgaatggcgatataatgttcttttttttgcttgtgcgacatatatgcaaacatcattaatattgctataattaaaataataattaaaataataactttagttttccgaatcatattttacctcacttttaaatttttaataaaggagtttttattttgaatctttcagacgctctttcaagaagtgtttccgatatgtcttatgaaaatttagataaagatcaaacatacgactttcttggccaagattacaaagtcatcgaaaaacgcgacgatacccagaatgggtttagagcatatgttttcgctccagtaatcaaaggtaaagttgataagagtcaacttttaataggttacgctggcactgacccatatagtctaaatgatattcgtactgatttacaacttcccattcatcataacacaaataatctaaaaattaataatcattataaagatttaaaaaactcaactattcacaaaaaatacaatacaataaaagataaaaatgacctttttagttttttcttctaatttaaataataaagcacttttcggtgatctatgggcagctaagtttgcaccgactcaaatggacgaaagtgatgcttttactgaatcagttaaaaagaaatatccagatagtgaaattcacccattaggacatagtttaggtgcgtttttagctcaatataatttaataaaacataatctggataacggtacaacgtttgcagcacctaacgtataccattcatttactggagactttaaaaaagacattgataatggtgtctatgattcaaaaatacgcaatattggccattttgatgatcctattaataatttgaatttttttaatcctcgtattggcaaaaatattacatcaatgccacattatgatggatttataactaaccttcctttgattggtcaacacacgcttaaatcttacaatgatttcgatgcagatggtaatgtgaaggaaatgccagaacttgaacaatttaatgatgaccaatctcttaataatagatttcaattatttgacccatttggtataaaaagcagatttttcgactctattaaaatcgatagttctatattaaatagaacaagtgaaaatgattttgatccttttgctattctcaataaaaaagataaattattcgaatcaaatgaccttgatatagaaggatttaataataaacaaaaagaagatttaagcattgatttaaatccttttgatgatgaattaaatgatgaggacgaaccattaattcccaaaagaggcgatagtaaaaaattaaaagcagaaaagaaaatctctgttaaaaaaaccaaaagtagttccaaaaattcaggcaaaaaagtaataattcagcctgatgaagtgcgtaatatcgctagcacaattcgtgatagactatttttgtatacacaaataattactgcattggatgaatatagagaagaaacaatgtcaggggctaatcgcattttagataaatatcaatcagagcttctaagcggttcacatgaatttataacacctaacgatcttgaacagtatatggagattttatcagttgagggaagttcaggtaatttcaagttttataatagtggtttaatggatgacttaattcaggcattagatcaaaacaaaaaagacttgctacaatttgctgaaaaactagaatttgctgcaaataaattcgaagaaaaagatttagaagaaagcgatgtttttggactatttagttaaagagggtaatttatatgagctcaaaagatgcaaagaaaagtcaagaagaagctagattacaacaattaaagcaagaaatgcgtaatagtactgataatatggttagcaatgctaaaaataatgtagcattaaaatttcaaacattaaatgaaatcattgaaacaattaataattcttcgcaaagtttagaaggtacatttgaaggaaaagcaagcgaagcagcccaacaaagtataaataaactcaaaaacaataacgaaaatcttaaacaaaaatttgagaccctattaaatacattgaagataaatggatgatattgagaaattattaatttatctgtacttttttatacattactaaaatcccctcgctaaacaaatagtaaagggattttaatttttatttcttatctaacttattttagtatcattaataaaaactacaattttatcatagtacagatttgccaatttaaatgtataatttaattatattcttattaagtcactatttaaaaagaagcatactctttatatatttatcctattaaacaaattaatatgtctattattcacctatatatctttcagtgtatcgatcaacatgctaaaacacatttgtgtaactctatctttagtaccatcttttaattttttcatctcacctataatatattctaattgaatattatcatcattattacaatgattatctttaatgaatgcacttaaattaataattttctcattactacttttaagctcatttgatactttgtttaaattattatagattatttctatagtatctatatctttcattccaatatacgcttcttttaatttagttctatttgtaaagtcaccatttaaaatagtttctaagtattggttatatatagaagtcatcaaagttgttcttttatttattaaacggtcttttaaacttttgatttcttcatatagttgctcgtttgaaaagctaactaaatctagtctatttatcgtatctccaactattaaattattctgatgcaaatcgtaattatccactaattcatcttctaattcgctaattttaatgccatctattaaatataagttttttccttttaaatttaataaagataaataagcttttactttataattaaaattttcattgtttttatcttttattatttctatagcttgaatttctttttcaagtagttcactttcacttaatttaaagaattcttttaatacatttaataaatcagctttagcatcttcttctttgaagttattcgttatatttttcaaaaaaattgattcatcaaaaataccatataataataagttctttagctctatatcaaaaaagacataatttgctagttcattatttttgtataagtatttaaacaaagcaatagatgttttcgtatttaaattgttaaaatcattatatgtaaattgaagatccttaatttcagattcacctaaatttccgcttcgaaattcattatacagaatgaataatgaaatgaataatgaaatgtacaaggtgattttaaaatcttttgatttatatttaatctcatcttgcattttattaataattaacttgaagtttgaaactactaaattcaaagttctcatattcaaatggtaatatttataatttaaattattttgtttagatttttcgaaaataatttcttttttttcatcacttatatcaaaaaaaaccattaaatagctctttagtagagatgttctttacaaataacttaggtaaattactttttactatatccattgctacttctctattattaggaaactttaatattctagaaattattttctcactattcttatgaaaatccgcttttttatttagctcatctaaatttcctataaatagcactttacagtctaaataatcaattaaatcatttctaataaatcccaaaaattcttcaaaacttactttgtcactcattctttcaacatcatcgattattagcaaagcacttttattatttttcatcagggaattttttatcttttttaatgaattatcatcaatataacgtaatatgttatcagaaaagttattcatatttaaataaggtactacttggaaatttttcatgctttttaggactttcctaagatttttagtagatgtatttatcaatttacttatgattatactcttaatttcatataagttttgcaggccatataaacttatatacctaatttctattttatcatcaaattcctttaatattttatttttaatataataagttttccctactccccattgtccatctataaaaagggcgaacaattcatcactatctatatagtttttaattgcttcatttaatttttccatcaattcacctctacaaaattttaaattctatatcatttatataaaaattttttgaagtaatccttgtttgagacttttaagtatctcaattttacatttattaaaactgatatatttatcaattttataaaatagatcacctattttttgctgttcttctagattatggggtatctttattatactatctaacaactctttttttgttatacctttaattgaagttccttgtagattagcgctaatttttttcattgtatatagcaatgaatataatgagtataatttgtcatatttaagactacttaatgataaaaaatcttgacttgtagcataatcaaattataccaaacacagttttccaaccccgactcttgtaactattgcaattgaattggcaggaataagttttgcagaagaaagctcaattgaattcttggaaataaatttattacattgtcgtagaatcaaatcatttacttttacgtcagagctttgaatccatggaatatctccattccaaaattctttaatctttgtatttggtgttccgcctccatatacttggcttgctatatcttctattttcttctcttcccaattcggataatcgtttccattctcatccttgaatcgcaattcctgtgagaagattttctgcatatagccttttttctgttgttgaagtaattcaagtttttgttcttctaattcaatttgtcggtcgagtttgatgaagaattcgcctattttttgctgctctttatttgaagggacaaatctatttattttattaatggtttgtttacttaagcttggcacacctgttgattcatcgtatactttccaatttatttttctaaataaacttaatataaatagtatgtctgtttcttttttaggtgtacaataaaataatgtatccaccgtccaaaacggcgcctcaagcaaatatggtttgtttatagtcccttttctcccaataccaacagcatcaatttcacttagtggttctgaaacacttgtcatataaccgccagtaccatagactggtatatcacctttttccaaatgtttataatcttttccagaattaacttttataagatcccctaactttttctcttcccattcgccttcaaaccctgggaatctcaactctggcacatttttcgtttgtgtattactcatctttcaacaccccaagttctttcaggtatgcattgatttcttgttcaatttctgcgatttctttatcgatatttttcaaatcttgttggacttgatctaaatcaattggcgcttcttcttcgaatgtatcgacatatcgcggtatgtttaagttgtaatcgttatcggcaatctcttgtaatgtcgcgctgtagctatatttatcaatcgtttttttacgcttatatgtgtctataatacgttcgacttgggcatcgcttaaatggttttgattttttcctttttcaaaatcattggatgcatcgataaataatacgttgtcgtcttgttggcgacattttttaaatactaaaatacatgttggaatacttgtcccatagaaaatattcgctggcaaaccaatcacggcttctaagtagttcttttcttcaattaaataacgacgaatgataccttctgcggcaccacggaataagacaccatgtgggagtacaacggccatggtaccttcatcgtctaagtaatgtaccatgtgttgaataaaggcaaagtctgctttggattttggcgcaagtttgccgtaaccactaaaacgttcatcattttcaaattttgaatctgctgtccatttcgcactgtatggtgggttcgcaataaccgcatcaaatgtattgcctaaaaaggctggattttccaacgtatcatcattacggatatcaaagttctcataacgtacatcatgtaacaacatgttcatgcgtgctaagttgtatgtggtattgttacgttcttgtccgaaataacgatatacttgtgtctctttaccaacacgcaacagtaatgaacctgaaccacatgttgggtcatacacgtgacgtaatttatctttaccgtctgtgacaatctttgccagtatcttagatacttgttgtggtgtatagaactcgccagcttttttacccgctgtcgccgcaaagcgcccgataaggaattcatatgcatcacctaacatatcaatttccatatcactgtgaacgaatggtaaatcgtcaagattaaccataactttggaaattaacgcagtacgttctttgacattgttacctaaacgcgttgaacttaagtccatatcgctgaacagtccgataaagtcattttcactttcttcacctagtgttgatgtttcaactttacgaattgccgtcgccagatgttcgatatcgaaatcttgcgtttcaatttcatgaatcatcgcgctgaataaatcttgtggctcaatgaagtaaccgacttggtcaattaattctacttttaagtcttcacggtattcttcatctgcccatgcttcttgatacgtgatgtcttcacctgacaaggcatctgcatattcttgttcggctttttcagataagaagcaatagaaaatcaagcctaaaatgtaattacggaattcactcgcatccatgttccctcttaaatcattcgcaatcgaccataattttttatgtaattcagcttgttgctgacgttgtttttcagtaatagacatgtgattcctccgcctttgcataagtaatttatctctttgtgtaatagatttattataacatttggttttgttgcgatgtttagaattttgatgttggttgtggaaattttgagttttagcggcgcaattgttattgaaaatttttttggaaatgttgtagctttcaaatgctttcaaaatcatttatattctcaatgatgtcaaaaagttgttcattcatacataaataaaaccaatcaacaattgagttggtgaaaatcaatcattgattggctttgatgcatattaaataatgcaatatatattaataaatgttagttatagtatattttgtcaggattgggtgaatgtctaagttttaattatttatctaaattatctgcaatgaatttcttaatttcaggagagaaataaacagcgaatgctcttgtgctttcacctgatggcttattacctgcatagattacaccaatagcttcgtacttactatttaatataggtgatccagagctaccaggctggattattgcatccgatgacactatattcccattcactgataatactttaccagttgattcatacatttgtagtttatttccattaggatttggataaccaatgactgatataggttcattttctttagcctctgatgctatattaaatttgctagtgaaatctttgaattttctaccttttggttgtgttgatttttcttcaacttgcacaaccgcaatatcttctttaccaggataatctacaatcttagtaactttataaagtccaccaccattattataaaaaccattaggatgtgctttaatttcatcaccgactttcatgtgataggtaacatgtttattagtaatgattgtatgatttccaactacaaatcctgttcctgcgcccatccatgtaaccccactgtatggtgcaacatttgtatttgtaatttgttttacactattttcggctttggctgtttgttgaataccctcaaccattgttgtgccaacaccagtcactgatgttaaaatcgtcaatgctgcaatacttttgatgattatatttttattcatttttgtgctcctataattattcgtattaatataaggttaggtttttgaagttttatttttttaatcatttcgaataaatagaatcacggagatatgatttgaattgttgattttgttgttaatttttaaaaatcatctatcttatgtaaggattgatttatctgcttaattatttatctaaattatctgcgatgaatttcttaatttcaggagagaaataaacgccatatccttttgtacttttatttgcagggccgtttccaccaaagtgaacacctacaacttcgtatttactattaaatacagctgaacctgagttgcctggttctacgaaagcatcagaaataatcatgttgcctttcactgatagcacttttcctgttgattcatacatttgaaatttatttatataaggttctggatagccaacaattgaaatgcgttcattttctttggcttctgatgctatttttaaaatacctgtataatctttaaaattcctattttttggatgaacagctttatcttccacatgtagaatggcaatatcttctttacctgcataacggacaatttttttaactttataaaaaccgccattattatattcaccattaggatgcgcaataatatgtgcgccaatttccatacctgcaacgacatgcttgttagtaacaattgtattttttccgacaatgaaacctgttccagatcctatcgaaacgataccattgtatggtgctacattagtatttttgattagtttcacattatgttcggctttggctgtttgttgaataccttcaaccattgttgtgccaacaccagtcactgatgttaaaatcgtcaatgctgctatacttttgatgattatatttttattcatttttgtgctcctctaagtattcttataattataatgttaggtttttgagtttttttgaatcatttcgaataaatagaatcacagagatatgatttgaattgttgagtttgttgtttattttaaaaaattatttatcaatgtaaggatggatttgtatgttcgtttatttttctgtgttatctgcaatgaatttcttgatctcgggtgtgaaataaactaaatatgatttttttgttgcatcatttttgacatcgacagcatatgcaattgcaatgacctcatgatttgaattaaacactggggatcctgaattgccaccttcagcaaatgcatctgaagtcatttgattaccatcgatggataatatctttcctgttgattcaaacatatgatgcttatttttatatggattagggtaaccaacgattgataaacgatcatttacttgagcgccactcgcaaatttaaggacttcagtattttcactgaattttttattttttggataaacagaatcttcttcaacttgaactattgctaaatcttcagatcctgcgtatggaatgattttttttactttatagtatccaccggtatcattttcgccatttggatgagcaagaattgtgctaccaacttgaacaccaggtaatacatgcttatttgttaaaattgtattttttcctaccacaaatcctgtagctgatccaattctaacaattcctttatacggagaaatatttgtgttttgtacttgcttcacattatgttcggcttttgctgtttgttgaataccttcaacaatggttgtgccgacgccagtcactgatgttaaaatcgtcaatgccgcaatacttttgatgattatatttttattcatttttgtgctcctctaagtattcgtattaatataaggttaggtttttgaagttttatttttaaaattatttcgaataaatagaatcacagagatatgatgatagttgaattagttattaagtttaaaaatgtaatctaagttgaggcatgtaagtgagctttccggcttatttttctgtgttatctgcgatgaatttcttaatttcaggcgttaaatatacgctgtatgactcttttttagaatgaccaatttggtctccactatataaaacgcccacaacttcatttttattgttaaagaccggtgaccctgaattgccaccttcagcaaatgcatctgatactaatttatctccattaattgatagtactgttcctgttgattgatacatatgatgtttatttttatatggcgctggatagccaacgattgcaactctttcattcgctttagcttccgatgccaacgttaggatttcagtattttcactgaactttttattttttgggtaaactgaatcttcttcaacttcaacgatagctaaatctgccgagcctgcatatgggataacttttttgactttatagtatccgccagtatcattttcgccatttggatgggcaagcactgtactacctacttgcacatctttaacgacatgtctatttgttaaaatagtgtttttacctactacaaatcctgtagctgcgcctactcttagtatgcctttgtatggcgaaatactagtatttgttatcttcgttacattatgttcggctttggctgtttgttgaatcccttcaaccattgttgtgctaacaccagtcactgatgttaatatcgtcaatgccgcaatacttttgatgattatatttttattcatttttgtgctcctctgtttattcatgatgcttttgatatagacgtttgctttttatgttatattcgaccgatgtttttcattaaaattattgaacacatgctcatggtgtatatttaaatatgtttattgttcaatgtgcttttgaataaaatctttaatttgaggcgtaaaatatacagcaccattgtattcagaaccaacttttccaatgccgccatatacaacacctatgacttcattgttagaatttagaacgggtgatcctgaattacctggttcgatatatgcatcaaaatttaaaatattgtctttaattcgttttatagttcctgtagattcaaattgtttaaaactgttttgtgcaggtaacgggtaaccgataactttaattttgtcatcaactttagcatcttttgcaaatttaaatgcttgaacattatcattaaaattaaagccattggatccacgttcaaccgcttgttcttctatattcatgacggaaatatcttcattgcctggataatcggaaatacttttaattttataaataccaccatttcctttgtcaccatttggatgagcagtaattctatcgccaactttataatcctttgatacatgtttattagtgataattgtatttttaccgattacaaagcctgtcgcatctttaaatgcaacgacgccatgatacggaaaaacatttgtatctttaacttgcgtaacatgcttctctgcttttgctatttgttgtgtctcttcaacgactgcagcacttattccagttactgatgttaaaatggctaatgctgccatgcttttaatgactaaatttttattcattttcaagctcctttacaatttgagatatattgcaacgctcgttttaaaacaatttgattatttatctatattttctgcaatgaattttttaatctctggtgtgaagtagacgccataagcatttctattgtcatcatctttcacatctgaagcaaaatgaatacctactagttcgttgttgctatttaggttgtgtatgcatgtcacaattctccctatcatgactattattccatataattatgatattaattatcgacttgtaaagttatattcttacttgaaaagttataaacataagtgtcaaataatgctaattatggtaagttaatattacatttagtaacatcaaagttaacaaatatagaagaaaatcctcaactttctaattatgaatcagaatattatcttcttgaaaaaaatttaattaagacacaatttatcaaaagtactaaaagtagatgtctatatgaagaaaccacttatcacatattgacgaatggagacatcttaaaccaacccggaaatttgaaattatggacgtaggcaaggcttttgtccaaccgtttcattgcatgaatttggaaaaacatgtcagatacctttatgaaatttccgaatatttgcatttaagtaaatcataaatttcagaagtattatgataatatataccattaaaaccaattactaattcattgttctaattatgcaggtaactttccgcaataagtccaaaataaatctaatggataaaaaataatcaaaactttaactttaatcaatattgaactgcaaaaatttggcacaagctaaaacaatgattaaaccgacagggattgccaatgacacaggtaaatcagtagaagaaatgatgtgtagaagttcacaagtaaactggaaaatagcaattaattaaaattcgtttcaacctttatacatactaagcaaaattacacactttataaaaataatattaattttgtaaaattcagcttatttggaggattaaaagcaatgataaaacaggttctaagaaaaagtttacatacagtaaaagaacatatcgataaaagtaacttccaaaaaaacttaatattttcacttgtcatattcccattcttatttgtgccttacattataatagatatactcgttcatttatctaataatcaagaatactttaagttattatcatctatttcacatatatttttaatgttctttgtaacagcaataagtttatacgctatactttctatacctttaacatctaattcatgtaggaaatcaagctttagaaagattagtaaagtaataatttattttttagtatttttttatatcctaagccatcatatcaatatagatatttctaaaatggactcttcttggcatttttatgcgctttttttatgtttttttattatttcatataaattaactgaaaaaataatgaaggtatgcaaatggatatttaatgaagaatcaaataacgatgaaggtttaagaactcaaaaattatttttataacgactgtggtttttggtacaataagtatcttctcaacaattgcaaacgttttagtagcaataaaacaatttctaaattagttatatcagctaaataataaaaggtagcaaaaattatatagtaaaagcgatagtagattattaaaaaaaatatatagcatttgttctcacagcgtcaaaactctaaagcaattaagccatcgagagtatttaaatacatataaattcaaattaaggagaataggtaaatgaaaaaagaaattttaaaaaagcaatgggtattatggacaatcttagtaacatctttctttagtataggcacaccaggtatagcaataatcccgttcagtttatcaatatatgcattatctaaattaatacttgttaataaatttgtagaacccgatttagtaacacttcaaaacttgaaagaaaaaaataaaagtatcaacattgaaaatcaaaaaatcaagcgtgaaatacaagaattgaagaatctaaaaaaagatttaatatctagtatagaagaaggtactaaagaacttgaacacattactagttatttaaatgatgaattatttaaatatgatatagaattaacttatcccttcgatttagttgaagtagactcatctcaaattaatacatatattaaaaaattacaaatgaaagaaaaagaattactaaatcttgaagaagtgaaaatatttaatgtttctacagagaataagagacatcaaaatgcacaggccaagcaaataatacgattatttaatgctgaaacttctcaattaattaataaagtaaatagcaaaaatatcgaaagcatgcagaacaaaatatttaaaagttatgaagggataaataaaatatttgaaacggataatgtacgtattcctgaaactttacttgacataaaacttgagatgttagatttaatgcacaagtatcaagttaagatagaagatgaaaagatcataagaagagaagaacgagctagactgaaagaaatagaacaagcagaaaaagaaatggagaaaaaactaaaagagcttgataaagacattagacaccacaataatgaaatcaaaaagctgacaatgtatttaaataacacagatttacaagtcgaaaaagaattatatattgaaaagattagagaattagatcaatcactcaagaatttaaattctgaaagagaaaatgtagaggacagaaaagataatgctcaatcagggtttgtttatataatatcaaatatcggttcatttggagaaaatgtttataagattggtgtaacccgtagattagaaccaatggatagaattaatgaattaagtagcgcatctgttccctttgaattcgatgtgcacgctttaattttctctgaaaatgcttttgagcttgaaaacaaattacacgaatactttaaaaaatataaagttaataaagttaacggaagaaaagaattctttaaggttaatattaatgaaattaaagataaagttttatcagaacacaatagcacagttcaattcattgatgaaccaaaagctatacaatacagagaaactttaagattaacttcactctaaaaatttgggtagcccgcctacccttattatttttttccaacttttatgagtatgtcatatatcaataaaaaaacaaccaaattgtaaaaggttttatggttttggatatgaatgtaattattgtaaaaagtaattatttattaatcaatacattgtaatattaagtgcaacccaataaaaattcataaaaatacccacaatgggcactttattgtaaggtgtttacaaccacgaaaacacatttaagtattgccaatatgagcgataactatcttatactaactgagcacgtatagagaaaattattctttaagacctattgcacgtaaattagaccgatccgcatctactatcttacgtgaaattagcagaaataatgtaaataagttatatcaatctgaaacggctcaaaagaattatgtaactacaagaaaactttgtggtcatcctactggatttactccagaacttagcaatatcattaagtaaaatttaaaaataccactactcttctgaattaatcgtgattcgattttttaaaaccgattttcttttataaccaaggatttatgttttaaccactgatatgattaggttcgatgttaatggtagcgatcatgcaaattcaccaaataatgaaagaatacctacgccacatatacacatatatactgaagaatataataatggtggtattgcgatcccattaaaagatattgaagatttagaattaacagatgaaattatagaatcattagacttctttatgaagtatactaatataaaacacgataatgttataatagaaccaagattactgtaaaagaaatggcgggatacttattgaagactatcgaagaaagaatgaacgaatatttcaactggttaaaacaaaattatatcttcaaagaattagatagttctacagaaattactactccctttaagaaccatttgaatgattttattagaatatatgctgatacactacctaataatgaaatttgtctatcagataacggattgacgattaatgaattagaaatgttgggtattgatataaacacaaaaacgagaactaaacttatacagaatattttaaatcaatttaatttaaaattagttgataaagaaattacagcggatgttaaaaattagagttttgctcagtctaaacataatttaattcaaggcatattgaaaatttatgaccttactttaactactaaatctaacgttacaaacagattctatgaagaagtatttgaattcttatatgaccgagaaataagaggtttagcacaagtttctgtttctggagaatcaggtttaaaatattctattgattatattgtttcagaaacaaaatcacaaccagaaaaactagttaactttacaaataacttagattttaacaaaataactaatgaagcttatatttaccgtgatatcaaaccaaacagaccttccagaaacaaattagaacctatcatgttaataattgtaaatgatgtatatcatccgataaatgaaagagcacaaactgtagcagaacatgagaaccttgagatattaaaatggtctaataaatcaaaaatcattgaaactttaacctcataaattaacattagacccctatttgtaattctttaattttcaaatcatatcgtgcaagtaaaaaagtagatacttttttatttgcacgttttattttagaacaaaaagagcaaggtcaacgaatcagaaaatctttttcttgatacgtatttgacacttgctcttttaagaatactaacatttcattgtatttccgttaaattaacggagaaggcggattacctcgatatatttatctctagagtgttaaaaaattgtacattcttaaacaatcaaaagtatacgttattaaattatcatttccactggagaatcatggcgactaaaagattattaaagtaaaaatacatttaaagtcacgacaatattaaacctctaaaaaacgtcattttcaaaccgccattaaacagcatttttaaaccgctattgacataaaacatatttagaataaatcattgagaaaaattaaataattcaaccagcaataaactaactatttacatgaatctataaaacacttagaacaaaagttcgaaaaacgcactttatgattgtatagtgatatcaaatatacttatcagtgagtattaagaaatacttccattttaatactcttagaatcaactactttattatctccgtaaatatttaaaaacttatatggaacaaaaggtactagttcttttttaggaaataagtcaaaccaaaaacttgtattgttcttttcagtaaattttatatatccagattcaaatgcagaaccatcaaactcgtatagctttttttctttagtgagccagtgtcttgctttgtaatctagttcttgaatagtaaccatattcttatttgtagttattgtaaatccaagtgattgtctattgtcgattgttacctgtacagtaattaatttatctctttcattttcagaactattaaatgtaagaccaccatacatacaacaacctccaaaattttggtttatatccggttcagatttaggtattatacatgtataaaaatatggaacaccaaaaatgtctacttttttacctttataattgttagctaattctgtattttctaattcagttttaacctcattataactcttatactcaattggaaaaattaaatcatgagataaaaactgtctagaattgataactcctcttccttcaacaggtggagacatataaagattcataacatttcccatagttcccttattacttttataatcacttactttatttagttcgtctattttaggatcgggttgggaattcgcataatttatattatgaaaaactatttctagaatcaaaataataattacagtagataatttcttcataaaacctcctctaacttattcagtctatttgacaatgaaacttattataaattcacgcttatagatagttcaggttgtagtgtgtcgatagcattcgttttaaaaataaaaattcactagcaaaataaattaacattctatttatcattattactaattacaacaaataattttgaatccgtattcaagataatatataaatttcaaattttactactattcaaatcgttgtcccctcatataatagtttattttcatgattcagttgataatcatcaatcacttaatctttatataaaaatacatcgatatgataattagatgagctaactgttctattatcactataaaattgaaaaaactctgctcctactgaaccttttatgttatataaatcataataaaatgattgattttgatgattattagaatgaaagaaaatgcatcctttttgtatgttaccggtatctttattgtatattttatataaattttctaatttaaatcgaactttagtatctaattcttgtactgttactttagcctttttagtttttataacaaaaccttcttgttggataccatctttaaatacattaacgcctataactctctcttcatctaattgatttccatcatatatcgtaactcctccgtataagcatgatgttttttcttcagttaagcctacacatttatttccataatacagtccataaatatctatatttttccctttaaattgatttgctaaatctgatgagttaaactcaactttcaaactagaagttttaagtacggatatatcaatatcttttaatattatagtattattcagtagttgatctgtactaattttatttgactcgtctaattgccacgttatatcagtataataacttgttaaattaaataacttactactatctatatcagattttttctttaaatcatttttgtctacatcagcattaacataattattatttataagacataataaagttattataatcgcagctatgcagaacaatctcataaactttttaatattttttataatataatctccctcaattattttttggttaaatgaacttctacattaatagatttactctcaactgtcttattatcattataaattagtaaatatttagtcggataaaatttttcaccagattcaggcatcatatcataccaaaaagaatgaccatttccttcgataaactttatatagccagtctcataaggcgaactattaaattcatataaatttttatgcttaagtaaatagtttctaactttataatctatttcttgtgctgttatgtttttcttattagtaggtatatcaaaagataatgaatttctctcgttttcaaaaactttaattaagatattatgagagttatcagttgaattatttttatctatttgatttccatcatgctcggtcacaccgccatacatacacgttttttcaattagtctaccatcatttaattccatattatccgctgaaaaatagcattgataataatagtttgtcccaaacaaatctatgtttttatttttgtatttatccgaaaggctattattattaaattctgtttttaaaattttagaaccatcaattttagagccatttattttaaataataaatcatgttgtaaaaacttctcttgggctttaatgtttatttctgatacgtgtttatcatcatacaaatacctcatattatccattagaccagtgaattcactcgctttattcaattgttctggtttaggattgccatttaacataaatagtaagctgcaagacttaacacatatgaagataaaagcaaataacttcattccaacaactccatattttaaatttttataaattcgatgtattacaggtaatattaaacgtacacattaccattaaaggcattaaaatttaaatagttaatacatatgttaatttcaaataaattcgcattttagtgttaaaactaattatcattagttactatctacatatgatatttcaacatcaagatgaaatttttcagattctattattttattatcttcataaattttcaaaaaacttacaggcagtccatctcctgtataaaacaaatcatatgaaaatgatttttcatcatttaaatgaaataaaactttccccttattaaaacctgaataaaatttagatttatacccatattctttacctttaccattgttattatgaccatatatattgtattcttcttgaagatatctccttaatttaacatcaatttcttgagctgtgactagttttttattagttgctattttgtcagtagaaattgttttatgcttgccattaatccaaagatttatagggatttttctagcagaatttaagtattgtcctgataaagtggcccctccatacatgtatttagttttacaaggaccattataatcaatgccaaaaatatccattttctttcctttaaatttacttatttcgtcccaattattagattctgagatcaaatcattggtaccggttgaaaattcaagttgatttgcaataggtaagtttttatctgtgacgccttttaaatctatataatcatattttgtatagaaatttcttaagttacctacaccaatatctccttgcgcatacgaaaggtctttaatgttaaaaaataatataaaaactaatataaaactgtatttaatttttttcatggcatttcctttactaagttatgattgaagtatttcaactttcgtccttataagatatttctacatctaaatggaatttatcagtttcgacagttttgttgtcattatatatttttaggaaactttcagcttgccctgttcctgtatcaaataagtcataagagaatgatgtaccgtcattcaaatgaaatgatattttcccagtattaaatccagaaaaaaacttggattttgtaccgtaatttcttcctttatttgtatcattaaagccataaatgttatattcttcttgtagatatcttcttaatttagtatcaatttcttgagctgttactatctttttattagttgatactttgtcagtagaaattgttttaaggttgccattaacccaaagattaataggaatacatctagacttctctaaataatcacccgctaaagtaactcctccgtacatatatttattttttagacaatatccactataacttaggccgtatacatcaacagcacgatttttgaatttttttacatcttcaacattcttaaattcagctgttactgtcgaattatccttagaaaaaactaattgatgtgaaagacgattattgtcaggattaatattttgatggtcttcgattggatagctaccataatagttcctaagattcaaaactccaacattagcggttgcgatatgattttgtgaataacaaaacaataaaacaacaatgataagtattcttttcattttatatttctcctataattaaatatgtctatctttattatccttttattgtaaaaaaacattcttcttcttaaatcatcctgactctatcccacttatatactattactcgttaatctacttttgttatctatactaaaatagaaaaatttttatagtaataaagttagatttgaatcattaatcgttcatcgtcatttgctatgcaactttgtaaaaatatgttaatatctatagttctttataggattgtaagttgatatgcatcaacttttaatttgttatgtaaataaataaacatcaatatgatagtctgatgaatctattgttttattatcattataaatttgcaaatattgatctggtaaatttcctttaatataaaataaatcataataaaatgattctttatgctccgaatgagaatggaatttaatataacctttttgtacatcactagtcattcgatcatataatttatatacattatttaattttgttcttactttaatatcaagttcttgtgcagtaactttctttttatctgtagtaacgataaatgtattaacatttacattatccttatacacagctactcctatttctttaggttcacttaatttattattttcatgaggtgttaccccgccataagtacaggcagttttcacttgatgctcaccatgacaatgcgctttataatagacaccataaatatctacagtttttccaaaatactctttggaaatttccgatgagctaaattccacttttaaatctttaaattcagcagattttccatctaaccaagtaaaatttttaaataataaatcaatatctaaaaatttttctgtagttaatacagttgactcatttattgtaaagcgattagtcatatagtctttatcaatattatgtagagcaatatcgtctacacttgacttcttacacaaatcctcaattttaggattttcttcatttgcatatgcattgtttacactacatattgcaattaaatttataattaataataatacatttaacattgctttactcttttttataatatccctccttcacaaaaagctttcttatagaaatttttcaatataaattaaaaaattctggttttaacctttaaatattcactaatactttttgattacgattttaaaacttaacaatcctattaacaattgaacaaacacattttaaactaagtgactcagataatagacaaaaaaccttaaaaatagcgcttaaaatgggtaaaaccattttaagcgctataacggagagtgagggattcgaaccctcgagacgcttgtggcgcctacacactttccaggcgtgctccttcggccaactcggacaactctcctcaacaataaatatgtaataaaaaaacagaagcgatatttcacttctgtttgtatgactcctacgggactcgaacccgtgttaccgccgtgaaagggcggtgtcttaaccgcttgaccaaggagccatggctccacaggtaggactcgaacctacgaccgatcggttaacagccgatagctctaccactgagctactgtggaataatagaaaataatggagcgggtgatgggaatcgaacccacaacatcagcttggaaggctgaggttttgccattaaactacacccgctaatgtaaacgattatggggcggctgaaggggatcgaaccctcgaatgtcggaaccacaatccgatgtgttaaccacttcaccacaaccgccatgaattaagaatggttcaggacagagtcgaactgccgacacatggagcttcaatccattgctctaccaactgagctactgaaccgtaatggtaataataatggcggtctcgacgggaatcgaacccgcgatctcctgcgtgacaggcaggcgtgttaaccgctacactacgagacctattaaattaaaaactatgtattgcgggaggcggatttgaaccaccgaccttcgggttatgagcccgacgagctaccgaactgctccatcccgcgctaatattattttgaattacctaattaatataccataatcaaaaacctaaagtcaagaactttttgaatttaatttaaatgttatctcttaaataattacttaaatatcgtagcaacatgttctctgttgaacacaaatattagtatattcatttttgtagtatacgtcaacgacatttttaaagttttttgtgtaaaaaaacgcttcttattcccttttatcatataagtgtctaatagttgttataaatagtgttacagcattttaaaaggtataggaattataaagtttacaacgcctataccttctgaaaaagaaatttaaaagcttgctacaaccgcatgctcattcagtcaacgactaccaatataacattgtagccctaagacattccttggcgcttcaattaccacatttttttcaaaatcagcagctacctacagacacaacataacacaacaatacattacctatcgtgtcatgtaatcttgcatccgatcttgcaacgctgtaaatgtttcgaagccatcctcttctaagaagtgccctccatcttccacgattcgcaagttcccctctaatgcattcattaaacgctgagtctctttatatgaaacgtatttgtcatttttagaactcaatccgtaaaaattgtcaactttctttttaatattatcgtaatcaatagttacattacttaaatcgatatctaaatctatattttctgcatcttctttaaagcccgctatactgaaaaagccttcaatcggctgatcaatcatttcaatatattttaaagctgtgattgaacctaaaccatgtgttacaaaatatgtatcctttttgcgtacattaatttgtttcgtcatagcttcaatccactgatccactgtattcgcttcaggggattcaaaattaaataatgttacgtcatatccttctaaagttaagttatgctccaaccactgataccaatgatttctactatttccatgcatagaatgtacaatgattacatctgtcatctcattctctcctttcaacttactacttcttttctatttaaaaaaatgaatgattacctataattgtaaaataaaaacaccttaattagaaatgttatatcgcaaagtgacatttctaattaaggtgcattgtcatcatttcaatatcattcaataatagctaaaccttcttcttcgattcagtttcatgaaataattcccgctgaaagtatcatgatttacacattacttccaccattatataacttaaaaatgactatatttcatcaaacattatctaaaggcgtcgcacctacaccaactccatccaacaattaacttacaactctgcgattacttcttcagcagcaactttaccttgtgtaatacaatcaggtagtccaaccgcttcaaaagatgcaccagttactctaagtcgtggatatgtttgtttaatatgtgcttgaatctgcctaatttgttgaatgtgaccaacatggtactgtggcatacttttcggcaaacgattgacaattgtaaattcaggatcgcctttaaatgtcatcatttgacttaaatctctacgtacaatcgatactaattcatcatctgtatgatcatcaaccacagtatcacctggtttacctacatacgcacgaatcaaaaccttaccttctggtgtagtaaatggccattttttcgatgtccaagtacatgcggtaatgtcagtatcactcgttctcgcaatcacgaagccagtaccatcataagtattttcaatgtctttttcatcaaatgccaatacaacagttgcaacagtcgtactatccatcgttttaaaataatcaaatgctggatcttgtccgaaccaattcaaaaaaacttgatgcggtgttgtcactaataccccatcgaatacatcttcttgttgattactgtaaacaattttatattgcttttgagatgtaataatatcatccactgacgtattgtaacgtattgtcacacctttatttttcacatcttgttctaatgcttcaataaatgaacttaaaccatgcttaaattgtttgaattgtccttttggtgcgccaggatataattgtctttgtttcagacgcttatttttctcatccttcataccttttatcagacttccgaatgcctcttctttttctttaaaattaggaaacgtactcatcaaacttaatttatcaatatcggtaccataaataccacccattaaaggctcaattaaattctcaagtacctcattacctaatcttgctctgaaaaatgcaccaacagaaatgtcaccattctgcatttgagtaggttttttaaataaatcaaaccctgctcttaactttccaaatggtgaaattaatttagttgtcacaaacggtttgatatctgtcggaattcccataattgatccacctggaataggatacaatttgtttttcgcaaaaatataagattgtccagtcgtatttgtaacaatatcttgttctaatccaatatctttcgctaattctgtcataatcgtttttctacctaaataagattcaggccctagttcaatcatataaccatctttacgatacgattgaatcttcccccccggacgattcgatgcttcaaagatggttacatcaatattaggatcttgctgttttaaaaaatatgcacttgataaacctgttatccccgctcctataatagccactgatttagtcacaacgtttcacgcttctttcgtcattaaaatatagacttgatttcatcaacaattgcaccgataaataatggatgtgtattcggcatttttggacgataataattcgcgccaatgtcatcgcaaacaactttacattcataatcattgtcataaagcacctctaaatgctcacatacaaaacctactggcgtatatataaagtttttatactgatgtttttcatataaatcacgtgttaaatcttgtacatctggccctaaccaaggtgtacctgtattaccttcagattgccaaccaatcgcgatatgttcaatattagattgttctttaattaaaagcgcagtatgttctagttcttgtggatatggatcattattcttttcgattaaaccttttggcaaactatgtgccgaaacaactaataccgtgtctttgtgttcctcttccggtatttgagctaatgtttcgttgactttattcgtccaatattcaataaatttaggttgttcataataatgtttcacatgtgtaagttgaataccatattttgcagcttcttcatcagcacgtttgtcatatgatcctactgaaaatgaagaataatgtggtgctagtactacagtgattgcttcagtaataccatctttgtgcatttgttcaaccgcatcttcgataaatggtgaaatgtgttttaatcctaagtatagtttaaattcaacatctgcatatgctttatttaatgctgaaactagcgcatcagcctggtcatctgttgtacctgctaatggtgataaaccacctataaattcatatctatctttcaaatcttgaagttcttcttcagatggacgtttaccatgtctaatgtctgtataatatggctctatgtcactttctttataaggtgtgccataagccataactaataatcccatttttttagtcattgataataccttcctttaaatgaattatctttcatgtgcttcaatgtaatactatgattatctttgtgtatatgtgtgtacgaatccgcttactttacgtaacgtctctggttgcacttctgggaaaacaccgtgtcctaaattaaagatgtgtttaccgttctccataccttgatctaatattggtttcaatctctcttcaatgacattccatggtgctaataaaattgatggatctaaattaccttgtaatgttttagtaacgcctaattgttgagcctgattaatagacgttctccaatctaggcctaatacatcaatcggcaaatcattccattcattgattaaatgactggcacctacaccgaatagaattaccggcacatcatgtttttctttaacctcactgattaatcgaatcatatgtggtttaatgtaacgtctgtaatcctcgacatttaatgcacctacccatgaatcgaaaatttgaatcaattcggcacctgcttcgacttgagctgttacatatttaacagatacatcgactaaatgattcattaaagcaaaccatgttgcttcatctctatacatcatcgcttttgtaaaattgtaatttttcgatggtccgccttcaatcatatatgacgctaatgtaaatggtgccccagtaaatcctattagcggcacatttaacttttcttctgttaaaagtttaattgtatctaatacatatggtacatctcgttcggggtctatttgagaaagtttctcaacatcttgaattgttttgataggattatgaatcactggaccaatacccgatttaatttctacatcgacaccaattggctttaatggtgtcataatatctttgtataaaattgctgcatctgtatgataattatcaactggtaaatgtgtaacataagcgcacaactccggctgatgtgtaatatcgaatagtgaatatttttctttcaattttcgatattctggttgcgaacggccagcttgtcgcataaaccaaacaggtgtatgtgtcgtttcttcacctttaatcattttcaaaattgtattgtttttattatgcaccataaaggcctcctaaattaaaatcattcttatctatattatcatatcgctcattcgttcgtattttcaataaataaatgtcataaaactgacattaaattacacatcatttgtttgtgtatttaaattttaaaatcttgatggattatctccacatttttttgtcttgcatgatttattatagtaactttaaccgtatattaatagtggtaatgactagtttatcgtcgtataataaataaaaacataagggggacctttcatatgaagaaattatatacatcttatggcacatatggatttttaaatcagataaaaatcaataatccatctcatcatttattccaattttcaactgctgattcatcggtgatttttgaagagactgaagaaaatgctgtactgaaatcaccttcaatatatgaagttattaaagaaataggcgcattcaatgaagatcatttttattgcgcaatttttattccgtcaactgaagaccatgtttatcaacttgaaaagaaattaatcagtgttgatgacaatttcaaaaactttggtggctttaaaagttatcgattgctaagacctgttaaaggtacaacatacaaaatttactttggctttgctgatcgacaaacttatgaagactttaaaaattctgatgcttttaaagatcatttttcaaaagaagcattaagtcattactttggttcaagtggacaacattcaagttattttgaaagatatttatacccaataaaagaatagattcgaagaaaacttccattggttatgctgttaacgtatagatgctaatgtaatctgaacgccgtatcatttggctttcaacattacatgcacctttacaacatacatgccaatggaagttttttagtctcgtaataatgtttcctgatattttaactttttaataatacttctaatcgttaataaacctacaatatagaaaatgagtacaacatagaataacgtcatatgttttataataaatgtcaatgcaaacacagtacaaataacaaacattaatctatataaaaactgttcataccctttgattaccttatcttcaggtacaggccacacttgaggccataagccatatgcttgttgtgaataaaattgtgccatttgtaacaatataatatatacaaataaacacccaataattgctgtcactaatggatatgataaccaaaccataagtaaaactgcaataattactaacctaaagataatattaaatgcgtctctccctcttataaagcttctaataaataagaataaatacatcgcattagagttaaatttattaccctttggaactggtaaaagtatatctagataacttcttctgactgcagattctttcaaatgttttacatcggtaaacatattaacaaatttataataattcatatgatgtcgatgttcgatagcaatcattttctcccatggatacaaaaagccaggtttatattttttaactaaaaattctattaacacaggcaaagcaaccatcacaaatgtgatgtaccattttggagctaatagtaagtaatatgttagagcaaagatgatgaatgatattaaattaacttgccatgttttaagtcccgattgataccattgccatcttaagcgtaaaccaacatatggaaaaattaatgcactgactccaaaacaaatataaaatgccacattatgttgattaatattgtaaaacaacgggaacattacaataacaataatgagttggattaaaatgcgcgcaaagtagctatataaaatcgcatgacgcataaattgagacatgtgtttttcaaatggtaataaaaagattttatccgcttcttttaggagtggtcgcattggaaaaatggatgtcaacgcaacaatcactgctgctattaatgaaaaattgatattcgttggaatatgttttaaccattcaccatatccaaaaataaatgcacccagcaaaataagtaaaaagaccatgaaatgaccattaaatataaacttattataataatttttctctttacgaagggcatgtaatcttttattaaataatgtggtcgcttggttacgcatgtacatctccaccttgcgtcacatgaatatatatatcgtctaacgtttgattatgtaagccagtttgttgtctcaatgcttctaaatctccaaatgcaacgacttcaccttcgtctagtatgataaaacgatcacaataacgttcagctgttgctaaaatatgtgtactcattagaacggttctaccttcgtttttcttttcaaccattaaatctaacatggattgaattcctaatggatctaggccaaggaatggttcgtctataatatacaattcgggattaacgataaacgcacaaataatcatgactttttgtttcatccccttagaaaaatgactcggaaaaactttcaattcattttctaaacggaatgtctttaataatggcattgctcgattcatcgcttcatcacgatcaatatcatatgccattgctgtcatctcaatgtgttcctctaatgtgagttcttcgtatataaccggtgattccggaatataagataactttcttctataagcctctatgtcatcattaatgttgatatctgaaattgatagagatccttccataggtgtaagcaatcctagcatatgtttaatcgttgtactcttaccagcgccattaaggccaataagtccaacgatttcgcctttgtttaattcaaaatttatatctttaattacagggcgttttccatatccacctgtaagctgttctactttaactgtcataaggcacctccatgacttatattgtaccaaaaattataaaatgctcatattaaatacacatatcctaatatcgaatttttagcgacaatgttataatgaatggtaatacaagttgaaaaggagtgtagtcatcatgtcagaaacaattttcggcaaaattttaactggagaaattcctagctttaaagtatatgaagacgattatgtctatgcctttttagatatatcacaagttactaaaggacatacgttattaattcctaaaaaagcttctgctaatatctttgaaactgatgaagaaacaatgaaacatatcggcgcagcattacctaaagtagcaaatgctattaagcgtgcatttaatcctgatggtttaaacattattcaaaataatggtgagtttgcagatcaatcggtatttcatattcatttccacttaattcctcgatatgaaaatgatattgatggatttggttataagtgggaaacacatgaagatattttagataacgatgcaaaacaacaaattgctgaacaaattcaagcacaattttaaatgtatgcttaatctaagctcgaacgggtataatatgattaatattataacaattgcgtttgaagtgataacatcaaggttagcaattttaaacaaaatgagttattaagataacagatgttaaaagtgaggagaatataaatgaaagcatcacgcattctattcggtatcggtgttggcgtagcagctggttttgtagttgcacttcaaggacgtgacgacaaaagtgtcaagaacaacacgattgatcgtactgcccctactggttcaaaatcagaactacaacgtgaatttgaaacgattaaacaaagttttaatgacattttaaactatggtgttcaaattaaaaacgaaagtgcggaatttggtagttcaatcggtggtgaaattaagtcattacttggaaacttcaaatctgacatcaatcctaatattgaacgtttacagtcacacatcgaaaatttacaaaatcgtggcgaggatattggaaacgaaatttctaagtagcacgtttacgttctcgatcacaactatttttattagtaacagcatatttattttttaaaattaaatgccaaataaacgagatgacattagaaattagatatttcttgtcatctcttttttatggctcgaatgaatgtttgattaccaattacagtaagacgttgtttgtagtgattttcccttaaatcatatttatgaattgattgaaaatattgcttaggattcattgtgttatccttgcactttgattacgctttacttaaatcattatcgacaaacaacatacttatattttcactgagccgaaccttatatgcacattacatataccttacttccacaaattattaatctggtatttattataattacatatcactatatttttagcatttgtatgacttagttagttaaaagatgcttttgcatatgccctgccatatccattttttatattattcaagttttcaaatactcatgtcacacgcgcctttttcataagtgatgctttattagcaaaaatatgtgttcgcagaaatttgttctgcattctacttctacgctagtcaatcagccaattttaccaatcccactttcgcgtttcaaatcaaacaatacgtcgcccctttcttcatatataacaaatcttctaacatgatatgttactattgaattactgaacctgagttagttataatctaacttatattgaaaagagatgaggcgtaagatatgtttttatgtaaaagacaaattgatatcaatgcacgatttggtttgcctagaattgcatttatgagtgcagttgcaaccatcattatgtttttagttagttatgaagtaatgtattttttatctaatacgccgttatcagatagacattttctcatctttttattacttgtatttatgacgtatccattacataaaagtatacatttattatttttcttaccatatagaaaatcgtttaaagttcataagttgactaaaagaaaatggcttatattctataatacctacgtcaatcaacctgtacacaaattttatttttgcattaacttaatattgccgttaattatcttatctgcaatgttcgtttatctaacaatttcattcccgcaatatggacattattttatgttcttattggcattgaatttcggtatttccattacagatttattatatttaaaaataattatattttctaattatggacaatatatagaagaacatagtacaggtattaatattttgaaaaaaattaaaaatccatatcatttataacaaaataattatagcaaggtgttattatttgttttcaggctatgtaatagcttacaatcaaatgtatatagaccttgtttttttattttcatcaatttctacccctaaacctaatgctctagtctgatgtcatgggttattgattggtgataatataaaactatgttatattcacgatgattaacttacaaaggagtttcaactatgaagatgataaacaaattaatcgttccggtaacagctagtgctttattattaggcgcttgtggcgctagtgccacagattctaaagaaaatacattaatttcttctaaagctggagatgtaacagttgcagatacaatgaaaaaaatcggtaaagatcaaattgcaaatgcatcgtttactgaaatgttaaataaaattttagctgataaatataaaaataaagttaatgataagaagattgacgaacaaattgaaaaaatgcaaaagcaatacggcggtaaagataaatttaaaaaggcccttcaacagcaaggtttaacagccgataaatataaagaaaatttacgtactgctgcttatcataaagaattactatcagataaaattaaaatctctgattctgaaattaaagaagacagcaagaaagcttcacacattttaattaaagttaaatctaagaaaagcgacaaagaaggcttagatgataaagaagcgaaacaaaaagctgaagaaattcaaaaagaagtttcaaaagatccaagtaaatttggtgaaatcgctaaaaaagaatcaatggatactggttcagctaaaaaagatggcgaattaggttatgttcttaaaggacaaactgataaagattttgaaaaagcactatttaaacttaaagatggtgaagtatcagacgttgttaaatcaagctttggatatcatattattaaagctgataaaccaacagactttaacagtgaaaaacaaagcctgaaagaaaaattagtcgatcagaaagtacaaaaaaatccaaaattattaactgatgcatacaaagatctattaaaagaatacgatgttgactttaaagatcgtgatattaaatcagttgtcgaagataaaatcttaaaccctgaaaaacttaaacaaggtggcgcacaaggcggacaatccggcatgagccaataacacaaaaccgagcgaccgtggtttaaaaatcataccacggccgctcggttttttcgcattaaaaatcggacagatgagctcatgtttcagtatactcatctgtccgatatcttttaattcttaatcgagtgattcaggattgtagaatctacgattttcaagaccaaatattttatctgtaaactgacccttgtcagtttttttataagccttttcaaacatattcattctagcatcgatattatcgatatagcataaaatttctgcttcttttaagtatggcagctttggcgaaccatactctaacttaccatgatgagataaaatcatatgtcttaacaacatgatttcttctccttcaatgttcaattcacgagctgcttcaactacttcatcactcgcaatcgagatgtgtcctaataaattaccttcgactgtatacgacgtcgcaacaggaccactcaattctctaactttaccaatatcatgcaaaataataccactatataacaaacttttgtttaacaatggataaatgtcacaaattgattttgcaatacgtaacatcgttaatacatgatagcttaagccactcgcaaagttatgatgatgagaactagcagctggatatgtgtaaaatcgttcttgatattttttcaataaatgacgtgtgatacgttgtaaattagcattttcaatatctagcaaataatgagaaatctcttcttgtatttctgccggtgataaaggtgcaccatctacaaattgttctgtttttaattgatcttcagttgtcgctagtctaatttggttgactttcatctgtttatttccgcgatagtttatgatgtcacctttaacatgtacaatttcttcaggcttgattgttgccatatcattttttgtagccgtccaaaatttcgcttcaatttcaccacttttatcttgcaaatgtaatgtcatataatctttaccttgtgctgttacaccctgtgtagctttatgcactaagaaaaagtgatcaactgaatctccgggatttagattctctatatttctcatcgtttcccgccttcctctattttgtttaatgtaatcacttcttttgatggaacaatattatcttttacacatgtaaagtatagtacttgatagtgttctgataatgatcgtaaataattcaacattttttcagtacgttttttatcaaaatgaacaaatgcatcatcaacaattaatgggaacggataatatggtcgtagtaccttaattaaactgatacgtaaagctacataaagtaattcttttgtagattgacttagttcaacaggatcatataattgaccattaacatgtttaaccgtaattgaatcttcattatagttaatcatcgtatatctgccatctgttaaatgcttcaatatttctaccgcttcattaataacttgaggcaaacgtttatctttaatttgtttaatgtgttcatcaactaaactttgtaaataacttaaacttgcccaatcttttgcgatatcattaagttgatttttaagactgtgatattcatgtcttaaattagcaagcgttgtatcagtttccatgtgattgatttgtgcacttaaatcactgacttgtgcttgcatttcaagatattgctcattatattcgtcaacttgagtagccaataaatgatcttcttcttcaagttgtgctgttgttttttcacttaaactagaacttaattcataagaatagttttggttctcaagatattttgttaaatcattaaaacgactcaaattactagtgtatgtttggtaatcttcatgatgttggtaaaaatcttcttcagtaccaacattgataaaatcgaatagtgctgtaatttctttattattttcttctaattgagcatttaaatgatttaattcatttgtaacaagtttggtattttcagcattaatacgccatttttcattcgtgtcttcagctgatttcaaccattgttgcacatcgtggaataaagataatttgttgaaataaacaaattgtgattttgttacagcttcagcatgattgtagaatgtatctaattcttgaaccaattgctggcgttgttgatttaaatcactgatatgttgatctaatgctttaatattcgccattgtagaaatactatcaacaattaaatcatttgaaattttagatgataagtataattcatccttaacgttttcaactgtcgattgtaattcatcatgacgccctttcgcatcatttaaacgaccttcaatatactgacgtttctcttctaaaatatctttatttttcaaagcttgttgccagtgatcacgaatgcgatattgctcatcaagatcaaaatctaagtcatagttttcacctaaaatggctagttgtgctttaattacttcgatttcatctgtgatggcctcgctataatatacttcttttgatttagacatgatgataccgataacaaatactaaagttaatactgcgaaaataataccaaataacatgttgtttgaaataaatgagaagacagttaaaccaatacctactaatgttaaaagaataaacgttgttcgtaacaatttttgacgtttttgtttttcttgttgctcaatttcgaaacgttctttcaacttgctatacaagttctctttttcgtttaattcaatgacttgttgtgagtattcttttttcttttcaaaagtctcttcaggaactattttttcttcaacagaatctagttcgctatgaaccgcattatcttcgattttattttcttctaaactacgttctaattgcttaatgtatgccgcttgttcttgtttattcttgatttgctcactgacataacttttcattgcctcagagctatctacgtcatgatgcgtttcagaccaaccaatatttgcttgcaattcatctttatcacgttgtttattcgcaatatccttttcgattgcagtaagttcaaattctttatttttaatttcattttcttgttgattcaaactaatgaaggcgtcaatatcagattgtttaactggctctaattgagtcgcttcttctttaagttgagctaaacgctcatttcttaaaccaatatctctttctaacgattgcttatgcgctcgtgctttttcgtaacgatctacacctttttctgggaatgtgattggctcaatatttaactgttgttctagagacttccattcttgtgaatgatcatgtaaagcaacctctttttgtttttcttcatgcatttttgataattgatttaaattatgctttaaattctctaatcgacgtgatgatttatctcgatcatctactaaacgatgatatgtttctagtttagcttcttcttcacgaatttgactttctagttgttttaattgctcaatttgttgattaataatcggatttttacctgattttttatataattcatcttttttacgattaatcacttcgcgcattgacgtgaattcagttgatcctaaagcccctgcttgtaataaataatcttgcaattgtttttcatttagatttctatgaatgtcttgaagccctagtacatcaaatgaaaagataccttgatatgtctttttagaaatataattaagtttcttttgtaaccaagcatcatcacgcacagcaccattaggtaaatatactttcacatcaccttgagcactgcctttaattcgttcaacttcaatctctaagccatcatcaagaataagtactaatttaccaccgtattggttacctagacgtggttctagtcttggctctttagactttttagttggaaaaccaaataatatcgaatggatgaatgcttgaatcgtcgatttacccgcttcattttcaccaaaaatttcagtgaagtttttattaaattcaattttacgttgaacaaattgaccgtaaccataaatttcaagtgatttaattatcattttgttcacctctcatttcagcttttaatatttcttcagcacgattaactaatgctgtatggtcgaatgttccataatcgtctaggaacttagatgcccttggatttaaatataagtctgacatcgctttatcaaaaacagtttgatcgactaataattccgctgaaaattcattaactaaaggtgactcatcattttgtgcatattgtatttttaactcatcaatatatacaaattgattttcgttttcttcataatctgtaatcatttcttcaacttgtaataaatcttgaggtgaaattaatgtctcactattaataacaagcgttaaacgataaaaggctttcccttcttctctcacttgttctttaaagttttgaatgacctcgtataaaccttgcttagatgtcttatccgtttcaatagttgcttcttcaaatctaatatactgtgtaggataaaatttagtttttaattttaagtggtcaccctcgattaataagcaacctttttcaccttgctcattaaaatgtctaccttgaatattacctgaatagttaattacaggcatatcacttaattgttgacgttcatgtatatgacctaaagcccaataatgatacaatttactgtttaaatcttctaaaatgaactcggtatatctttcgttaactgaagatttactgtacgtaccatgcaagacaccaatatgtatgcctttttggccttgacttgatggatattcatcaatcttgttctcataacttgctctattttcataactaaatccgtgaatataaattgtttcaccagatttagtaattgcttcatacgtctcaactttatttgaaaatacagaaacattatctggccagtttgatgaaatctttgatgataatgggtcgtgattaccatgacaaacataaacaaagatttgttcattttgtaaacgttcaaattgctgttttaagaaaatttcagcacgtaatgttctgttttcactatcaaacaaatcacccgcgataattacaaaatcaacatcttgttgtaatgcaatatctacaatgtttttaaagctttcataagcacttttttgaacatcctcaaaaattttagggcttatatgactcttagatttgaaaggactatctaaatgtaaatccgaacaatgaataaatttaaccatacatccatatctccttaattaaaggttctaacatcaattttgcaaaatccaactatacaaagcattctaatcactatattcatacttataggtgtagtgattcattagctgatttattaaaaccagtcgccatttttatttttatttcgttaaaaaattattatctacacaataataaagtgctttagtcaaatcgtgatgttttatttattaacaagtttattatttcttcattttaccataatacgcttcatatcgtcgatgaacatatgaaattgagacacatttataacagtttaaaattttatttgtagcgtgcgttgatttttttcaaaaatttcagtcgaaaatgtaatttccgtaattgttaacaccgctagtgaaccaactgatacattaaagatttacatgattactctactagatttgcttggcagtaatgaccaattagaagctaaatgtcaaaactatcattgcacttaatacgccaaacattttcaagccgttcttaatgagtcattaaaagtgaaacacttttccatcagtccgatacatgaccgaactaatagtattatgctcaaaattttacactccaaaatgcaaaaaggaagttaggacacgtttactagcctaacttccgttatcaagctcatccgcccgttttggcatagagccaatattgtttgattgcccagcttcagtcgtccgttctgagctaaagttaagacatgtttaataacctaacttccgatattgaacgcatctgcccaatttgacagggggcctccaacttccgttatcaaaactaaaaaaactacccacaaagtctaggactctgtcggcagtttattcctctatttaaaggattgaaaaatattattttaatattagtcagcgtaaatttcgtctaatggtttaacgataatttggttgatttcttggaatacttgactcattttttgtttcagcattcattaatgcagagatgttttcatctttttcaattgcttgcgcttgttcttgcgctttttgtaaatcttcttcagcaatttcttcaccttgcatttgtttttgttggaagttaatttgagtttcacggaactcgtcgaataactttttagattcttcgttagcttttacattagcgaatgcttctttgattgctttgtattcttcgctttctcttaaagcttgttctaattgatttgcataatcatataaatttactgccatggttatagcactcctttgttgtgatgtttattaaaacgttcgatattactttaccacatctcgcttttttagacaaagattgcaaccaaaccttggaaaaatccaataataccacctaaaatgaaacctaatgacataatcaactttagttctttgttagcaatttctataattaatttttcaatataatctaagtcaaacgtattaatttgttcttcaattaatcctcgtaaatccacttttttcataattgtagataagtgaatcgataattgttcaatgattaaatttgctaatttgctagagagttgactttctaaataatcaacaaattgaggcattaacgtaaccactggcttattcgcttgtttgcttgcatatgttgttacatacattgatagattttcagcgatttcattaaactgcgacgtatctaacagtttattcaatgatttatctttaaaagtttgatattcattggtaattaacgatgtcacaattgctcttgctttaggatgagatgttagacgtataagttcttgttgaattcgatctgcaatgctctcttttgtcataaacatttgcaacataccaattaacttacctttctcattgaaaaaagtatccaacatatcattaatatcttgtgtgccttttgcagatgataaataatttcttgcacgatcacataataagtctgttgcgttatctacatgctgatctaaaaatgttacaagttgatttggcaataaagatgctattgtttggttttgatgctttgtataataattattcaattgtgatgcaatatattgatttccattagtttgtaatacttgttctaaatcaatatcgatttgagaagtaatttgtttaattgacaattgatctttcgtcaacttttgtaactgctgttgaatcatagattctattgcttgctgtgattgctcgctttttaatttttcattaattaaagtttctgtaagcaaatgctcttcaatcacttggccaattttagttgcaatttcttcgcgtcttttcggtattaaacctggtgtaaatgggactctaaatttaaatatatagtatggtttaaaggggtgaaacagcattctaattgcaattacattagtaataccaccaattatcgcccctactacaatcataaatatgataataaatagtgcattcataattttgactcctttatgacaacatagttattcattataccactatttttattttttaattcattaatcatttcactttctgctcaatttattattagtttacatacaaaaagcgatgcctcacctctcgaaacaggtgtgttacatcgcttttattatttattaaaagtatataggcctagatatgtactaattcttctttagcatttctgttaaagtatgtttcagcttctctcattttagaagtaccgaaaattggttggttatctggatttaatacacgataaatattgcttactttgttactttgtaaaatgtacccattacgagtctcaatgttattccaataaatatcacttgttggtgcatggtttggatatgcacagtgatttcttgaaattgtttgaacgatttctaatggatcacagccaaatgtactgtttaatacttcagagtctctgaataatgcacaaattgaaatacaagttgtccagtttggtaatactctctctttttcgatttgtactaaagtctttttagaaagtccaattgtttgcgccatagtatcttgcgtataaccagcctctatacgaaccattttaaattttgtttgaattaaatctgtaaaactctgtctatccattctgttatctacctttctgtttggggaattttatccggacacaagaaattgcaataatacacatttcttgaaacacagattacatcttaatatatttttaataaaatgaaaagagtcaatttcacatttgtattaaattttgatcaagtcaacaaaagttaagtttacttcataatgaaacaaaagtaaacgaagttaaattttatgcattatgtctacatttgataaaacttacacttttattatgatatcaaatttacaaagaaaactgtataataaatgctatcgctgtaaaaaaaatctaaataaatcgattaaaaattgtcgattttttgacgaagctacatcaacgcaactttaaatcaacttattttccattgcataaattgctgcttgtgtacgatcgctaacttgtaatttactaaatatatgactgacatgtgttttaattgttttttcagatacaaataaagtttctgctatctctttatttgttttacctttaaccatttcacgtaacacttcaatttctctctttgacaacttattcgtgtagtgtggtttttggctaactgtttcgaatacatcttgtgccttaggatgtatcattttttcaccgttcataactcgtctaatagtttcaattaattgctgaggctcaacgtctttcatttcataaccatcagcacctttattgattgctgaaattacatgttcatcatcaacataacttgttaataccaaaactttaatatccggataatgtgccttaatatattccgtaatttcaataccattcatgccaggcatcactaaatctaatagcacaatatcaggatgctcatgctcttttaaatattctaaaaatgtttctccatctgcaaagtcttgtaaaacttctatgttttcaatcgtggataataaaaatcgcaatccttgtcgcacaatataatggtcatctactaatattactttgttcatgggttatctccttaaatcaagctattttataggaattgtaaattgtatttgtgtaccctttgttggctgagaatgaaaggtcactttacctcttaataatttaactctttgttttatgttatttataccgtgtgatgaagctatctgaacattatcgatctcaaatccttgaccataatcaatcacgtcaatatatagtatatcgttcatttgttttaatgtaagatccattttattcgtatcagcatgtttcttaacattattaatacactcttgtaatgctctgtatatgttttcttcgatttcattagataaatcgattaaaccttctacatttacatttaattgtatatgcattaatttactatatgctgtcaaagcatgaattaagccttgctcaagtccaactggcttaagttgccaaatcaatgcacgcatttcattaacggcattttgactcgtttcctcaatcgtcttgaaagcttgtttagcaatggattcgtttgacatgccatacgcagcatgtgctgttagttttacagaaaataacatttgatttactgaatcatgtaaatctctagctaaacgattacgttcattaatttttgctgcttctttttcacggtctgttaaataaatacgtttgatggctgaccctaattgaaatgcgacagactctagcaactctaaatcttcatcactataaatttcagtatttggtgacgctacatttaaaatgccgaattgttcttgacccgatttaagtggtaccgttgcatgatgtgtaatattgtcattttggctaggaaatgctttagaggctaagttaatacgagaacaattgacgatattcgacgctttcattagcctacgttgattaaatgctttcacacaccaacaagacccatctttaatatagtgacagtggtctgctgtcaaagattgtggtaaagccacatgtgatacaagttcatgttcacctacgctattgatgaaaaatatccagcctgtcgtgaaattactgccctcaattaaatattttaacgcaccttgggtcatgctatacatttcagtttcttcatttaaaaattcggcaatctcttttaataaagctagtcgcgtcctttgttccatcaaatcgctccaattcatttttacgtgtattaactattatacattgagttattatatttttaaatcttagacgtgaacatgataaaatggccttgattacttaatagttatatttcggagaactgatttgtgatatgatattaaagactataggaggattttatgaaatttaaaataccagaaaactttaatgacttaagtttacgagatattttccaacaacttaaggtacctaaaaaagatttacatcatttaaatatgtctaaagatattactattaatgataaacctgcgcgattaatggataaagtgcatactggcgacgatgtatttgttccaaccatcgatgaaaaaagtaattatgttccaagttatcgttatgcacaaattaaatacgaagatgatgatatggcaatcgtaatgaaacctaaaggtgttaagacccaccctaatgatttaaaagaaagcaatactttaatgaatcatgtgatttacacggttgatagcgattatgtcgaaccaattcatcgactggaccaggaaacagtaggattattaattgttgctaaaaatcctttaatgaaaaaaattcttgatcgcatgttagaagacaatgatattacgcggatatacaaagcaaatgttaaggcacttttacctttaaaaccacaaacgattgatatgccaattggtaaagataaattccattcgaataaacgacgtgtgtctcctactggacagcgtgcaattacacacattttaacttcaaaaatgataaaagaaactgtgtgccaacttgaaatcaagttggatactggacgtactcatcaaattcgtgtgcatttagctgaaattggtcacccagttattggtgatcctttatacggtgattcaacgttaagacaattagaacttgaaagttacaaaatagagtttgtgcatcccttgactaaggaagtcatttccgtttctttggatgactaatttgtttagtttggcatgatatttaaatatgcaatactgcattgtaactaaatcaagtatcaacttaaatcggatagatggaaaattattaattttttcagatgttcggtttttttatgttttttacgaccttaggattttatattttgaatgtatttggatttatagcatccttggataatgacttgtagtctttttcaactgcgttacgtgtatctaaggacaatacatgacatcataagatttttatcacatattgtttggtcaatacatgtacaacaattcatcaaataaaaaataggttctataataaaatggaatccatgaaaagtttttcctttcatggctctatatcaaatcggacttataagttcaatttgacatagacaaaaaaataaagcttgaacactacatctacctgtaatgcccaaactttattttatattaatatttaattaatgaggatctaccatatcttctggtttaatccatgcttcaaattgttcttctgtaacatatccagtttgaattgcagattcttttaaagttaaaccttctttatgggctttcttagcaatttgagcagctttttcataaccaatatgtggatttaatgcagtaactaacattaatgattgatttaaataattatcaatattctcttcgattggttcaatgcccactgcacaattgttattaaatgtttccattccgtcagctaaaaggtaaattgattgtagtgtattatgcataataactggtttataaacattcaattcaaagttaccttgtgaacttgcgaagccaacaactgtatcattacccattacttggactgcaaccattgttaacatttcacattgtgtaggattaactttaccaggcataattgatgaacctggttcattttcagggatagaaatttctgccaaaccagctcgtggccctgaagccaaccatctcacatcattagcaattttcattaagtctcctgctagcgccttcaatgttccgtgtagttgtactacttcatcatgtgctgttaatgcatggaatttattttcagaagatacaaatggataacccgtattttcagaaatatactgtgccactttatcaccaaactcaggatgtgcattaatacctgtaccaacagctgtaccaccgatggcaagatttaaaatgtgcttcttagattcagataacattgtttcgcaacggtcaagcatataacgccagccactaatctcttgtcctagtttgatcggcgttgcatcttgtaaatgtgtacgaccaatttttataattgaatcaaatttatcttctttttctttcaaagtatttcttaaaagttttaatgcaggttctaattttgtttcaacctcttgatatagtgcaacatgcatagcagttgggaatgtatcattcgaactttgtgatttatttacatcatcatttgggtggatactttcatcactatgatgatcttttaaatacatattagcaacataacttactacttcgttcacattcatattactttgtgtaccgcttcctgtttgccatacaactagtgggaagtgttcatctaattcacctgataaaatttgatcacatgcgtatacaatggcatctttctttgcctcgcttaattttcctaaatcaaaattagctaatgctgctgcacgctttagttgtgcaaaaccataaactacttcgattggcatacgctctttaccaactgggaaattacgtttacttctttctgtttgagcaccccaatatttatctgcaggtacttctatttctccaaaagtatcatgttcaattcttactgacattcaatttctccccttatcactgtttatttaactgtagtatatcattaaataatttaattgagcaatttatgattaaaacgttttcataatttgaaataaaaatacactaatcgcacgtgcccaccctttattacagtgatacggtcatacgattagtgtgttatctatcattatttagttaatgttgaactaagtttaattacgatactttgttttagtagcttcaaccgtagcaatagctgtaagtatatataatacagcactaacaattgtcgtatatggatttagagcaacaagcgtacctaatactcctgttaaactcgcataaaacccatcaagtgtataatacaatattcctgttattaataaacaacaaattacacttattacaatacctgattgattacttttaatgaatgtttgcgcattaacatcatcgattaatccttttgataaattgagttgtaattttattactttgaaaataataggtaaatataatgccccaattgccaatggaaatgctttaattgatattaaacttataataactgttgctatcaataattgaatccagtattttcctaacataaatatataaatctcctctaatttcattcttcaatagcatatcataatcttggcatattaagaaacgcggtttaatgatttcattaaaaatattactgatagatgacttctttcaattatgtctggagtaattaattatcaattctgtttaaatggtgttttaaaatttaaaattgaatttttgatatattactatgtctagtacacaaatcaatattctatgctctacaaagttatattggcagtagttgactgtagtccccaacattgaagcttcggcatgtcagcttactatttcatgcaagctggcggggccacaacacagtggaattggatttccaatttctactgacattgcaagttggggaacgggtccaacatagtgaaatcggatttccaatttctacagacattgcaagttggggaacgggtccaacatagaagctggcggaaagtcagcttctgtgaatataataaaaaagctaggtaacaaaatgctacctaacttcatattcaagattatcaatcctatttgatataggttctatactattcattgtttacatgataaatagctgtatattacacaattataatactttactgactgtcttcttcagaattcttttcttgatcattttgatcagaaatttgttccatttctttacctaattcttttaaatcttcaaaatcagttaccatactgttttcttcttcatgataatttaattttggatctttgtctttagacataatcaatacctcacagatttttaattaagcaaagcgtgacgtaaagtaagctttaacatcttcgggtaaacctgcagccgcttctttatcaagaataacatttaccattctatgtgcttttaaatcggctggttcaaagcttgttttaccattttcttgatataatttttcaactacatctcgtttattagcaccagtcactactaagaaaatttctcttgcttccattagtccttgacgaatactaacatttaacttaccttgctcatcgatagaaacaacttgtaatgttaatttccctttattttctttagttttaatcttatcagcgattaattcgattgcatctttttcataagcaattggataaacttgacctgctggtacacctaacgcttcgaaatatgattttttatcgtcataatctaaaatatttatttggctaaaatcaacagcatgtttttcaatatttttctttaattcatctagtactggcgcttgatcagtatctaaatgaaaacctgcaattgtagtaggattattgttaaattgctttctaataatatcagcagcatattctgctacaagttgactattgtcaaagactttaaagttcattgccatgatttctacactcctcttagtttgcattttacataaaaacggcgatattaataattattataccctaactttcaatatatcaaaccatttaactttaacatgcttatactctaaatatagcacttaagcatcatttttataatgaaaatgagtaaattttaattcaatcctggaaaatcttgttgacgtaacgcttcataaattaataacgcagcagtatttgataaatttaatgaacgaatatgttcactcataggaattcttaacgctgtgtcttgatatttctctttcacccagtctggtaatcctgtcgtttcttttccaaaaatgaagtaaaaatctttgtcatgatttgaaaaatcaaaatcactataagtctttttaccaaattttgttaataagtaatactcgccatttgtggcttcaaaaaatgcttcaatactatcatgatacgtaatattcacaaattcccaataatctaaaccggctctttttaacattttatcatcagttctaaatccaagaggtttaattaaatgtaaatgtgtgtttgtacctgcacacgtacgtgcaatgttaccagtattagctgggatttctggttgatataaaacgatatgatttgtcatattactattctctccttgtgtccaatccttttatcatttcattctgaacttctgcatcctcttgatcgtaatttgcattgataaaatctcttgcttcttccccaagaatttgaccaatagcccaataagcagttgctcgaatcatcggtctttcatctgttgttgcaacttttttcaattctggaattgcatccacttcattaaaatgcgccaatgctaaaatagcatttcgttgtatcggttttttaccacgccaagcacctgcaaggtgaccatatgtttgtttgaattctttattagacatacgtagtaaaggtactaatcttggctttaaaatttctggttccaaaatgatgtcatcttgttcggtattaatacctctatttttcgggcaaacttgttgacacgtatcgcaaccatataatctattcccaattttataacgatattggtcaggcatatagccttttgtttgcgttaaaaaactaatgcatttctgactatttaattggccatttccaactaatgcacttgttggacaacgatcaacacaaattgtacaatcaccacagctatctaataatggatcatcaggttcaaaaggtatactgactaacatttcaccgaggtatgtccatgttcctagtttaggattgatgacaaagccattacgaccaacaaatcctaaacctgcacgttctgctactgccctatctgataatacacccgtatctaccatagatttgatttcaacatctggaactttagattcaataaatgcagctaacatatctaaccgtttacgcataattgtatgataatcttgaccccacgatgctctagcaaataagcctctgcgatcacctctaacactcttaggtgcacctttcagtttgttaggataaccaactgcaattgctatgattgaccttgctgttggtaaggataatttaggctccgttcgtaaagcaatatcagattcttcaaatcctgaggcataaccatttgcatgatatgcttctagcttttgcttcaattcatcaaagggatcggcagtagtaaatccaatactgtcgataccaattgtatatgcatagtcaatgatatcttgctttaactgctttgtatccaatcgtatgccccccataaaataatactatgttattttaacacaaccattattcatattgaggtttcatttcacataattttaataataaaaagcttgaatatatgatataactttgtggtgcgcatcatatattcaagctacgttaggttgttataatactcttgctaagaaattttgtgttctttcatgttgcggttgttcaaatatttcgactggtgtgcctgactcgacgacaacgccatctgccataaatatgactttgtcacttacatctttggcaaatcccatttcatgtgtcacaaccaccatggtcataccttctttagctaggtctttcattacttttaatacatcaccaactacctcaggatctaatgctgaagttggttcatcgaataaaataacatctggatgcattgctaaagctcttgcaattgctaccctttgtttttgaccacctgataattgattcggatatacatctgctttttcttttaatcccactttatctaataacgacaatgcttccttatgtaattcatcgttattatctttctttaataatttaggagctaaaataatattatcgacaacttttttatgtggaaataggttgaagttttgaaataccatacccattttttggcgtagtttatctacttgtgtccctttttccgttaaatcattgccttcaaaaatcacttgacctttagtgggtacttctaataaattcatacatcttaacaatgtacttttaccactaccagatggacctattattgctactacttccccttgattgatttcaagattgatatcttttaaaacttcattatctccaaaaactttattaagattgtttattttaatcactggcattcaatctcccttcaatcatgttcataatgcgtgtaagtacaaatgttaagacaaagtataatgctgctgccactagtaatggtgtgaatgggtcaaatgaaataccttgaaccacttgtgcattaaacataatttcgccaactccaattgttgacacaatagatgattctttaattaaagtgacaaattcattacctaaagctggtaaaatgtttttaattgcttgtggcataattacacttttcatcgtttgtctataattcaaacctagactacgtgcggcttccatttggcctttatcaacagcatttatacctgcacgaataatttcagcaatgtaagctgaggaattaataactaatgcaattgttccacaaacaagagctgaaatgtctagtcctaatgcagccgttataccaaagaatacgataaatacttgaactaacattggtgttcctcttaatatttcgatatagatagaggcaatccatgaaataatttttattttacttaatttcattaacgcaacgaatgcacctaaaatagaacctaatgctacaccgataagtgaaattaatattgtaatcttaattcctttcaagaaaaaactaccatacttagaaataaaaccactgtcatcattcatcgcatttgcagcattagtcatatatttatcgattaatcctttatctttaacctctttaatcgttttattaatttgtgacaataattttggtgaatcttttggtactgctatcactgtatctttttcttcttcattaaatttcacattggaaattcctaatttaggattttgttttaaatatgcttctgctacaggtttttcaactacaacaccttcaacctttccacttttcagagctaatataacgtctggtaaacggcttaatgaagtaatagatgcattttcaatttcggtttgagcgattttttcttgttcagttcccttttgtgcccctacttttttattattaaagtctttgatatctttataatcattaactttatctttctttacaagcatgatatttttagtcatcatatatgaatctgaaaaatcaacttgcttcttacgttcaggcgttgaagtcattccggaaataataatatcaatttttccagttttaagagctcctaacaaactatcaaatgacatattgacgatttttaattttaaattattatctttcgcaatttttttagctaaatcaatatctacacctgcatactcagtcttaccattaactgtatgctcaaattccattggtgcataatctgcagaaagacccactctaagttcaccgcgttctttaatcttctcccatttttgatcttgttcagcatatgctgcgggattgatatacaccatagcactgctaattaacaaccctaatactaatataaacctaattaaacacttcatttatacagccctccctaattaatattcataattatacatattaatacattttgatgcaatagtgttttataaatgtatttttatcaatataaagaaaagcttctttttaaaagactttacttaaaaaatcgtctattatacgcgaacaattcttaaattttaaaatcaatcaaaaaaagcgctactatcaatatcttattgacagtaacgcctatatttatcatatattaaaaattattcttgtcatcaagctataaattattgttttggaacttcaaatttataaatatcattagaatatataggaatgaattttttacacaattcatgaacaataaacgccgatacaaatggtatgacaaaataaccaagagctaataaaataatattcattgttggatcacctgacattcggttaaatgcatttattgggccaactaatcctgtatatccaaatccagcagacaatggtgttcctttaacctgaagaacgtaagcaatgattccagtaattattccatttatagtcaatggtatcgaaataattaaatttttcaagtaaactgggatcatcatttttgcagctcctatgagtaaaactgcatttacgccaatagaattgacacgcaatgagccgaataagaaagtaacacaagcagccactatacctaggtttgctgctccacttcctagcccgtttaaactaatcgcagttgcaatcgctactaacgatattggtgttaccattaataatgaaaatgccacactaataagtatagacattaacaacggatttaagtctgtaaaagaatgaattacatttccaattgcttgagtaatttttcgaatgtaaggtaatgtgattagaccgatacccccactaacgataggtactaaaactggtaatataattaattcaaaagatccaagcttgttttgtaataccatatatataagacatgcaataataacaaccaaacttgtatttataatgtcacctataccttttaacataaaactattattgctatatacaacagcacctgaaccaatcatagctgatgtacctactatagcagcacctgcgccattaaatttaaattgatgagcagctaaaaccccaataataaatgccataaatgattgaattagtatcactaactgatacgttaattctaaaatttcattaccacttttaaatatttttaatacttcacctaataaagcattcggaacaagtgcaataacaacaccagcaccaatagaatttaaaatcttactgaaaaactgtttattatcagcattctttgcgttactcataaacgacctccaatttgaacattaaactcatcatattatagaaaattaactttaacaatgattagttggctaatttaatctaaatataacaattcacaaaaggaataaagtaaattggaacaatctaatcagtaaacaatgttatgttaattttaaaatactactaattacatcttgtgactaataatgtaataaattgtaaatattaaaatagccatattactattaagatagataaattgaatcgacttggtataaagcacaataaaatagcacttttacaaatattttattagaaaagttaaaacaaatacataccccagataatatagtcattatcattaatgtaataccaaaaaaagaagttaaacaatgtatagttgcttaacttcctatattaaactcatcattacaatttgacatagagcctattaaagcgtgtgccatttgagtgccactttatttgtattgtatagagagaaataaaaagaaaccttgttttacaaggtttctagtacgttatgttatgtaaataacagttaattataccggtggtcggggtcgaaccgacactccacaagtggaacgggattttgagtcccgcgcgtctgccaattccgccacaccggcttaatggtaaacaaaaaacttccctttggaagcaattatggagcggaagataggatttacacctatacctcgttccgggaaggaacgtgttctaaaagttgaactactcccgcaaatattaaattatggagcggaagataggatttacacctatacctcattccaggaaggaatgtattctaagagttgaaatactcccgcattattattaaattatggagcggaagataggatttgcacctatacctcgttccgggaaggaacgtgttctaaaagttgaactactcccgcataaacctggaggcggcaaccggatttgaaccggtgataaaggttttgcagacctctgccttaccacttggctatgccgccaataactgggctagctggattcgaaccaacgagtgacggagtcaaagtccgttgccttaccgcttggctatagcccattaataataagggcggctgaaggggatcgaaccctcgaatgtcggaaccacaatccgatgtgttaaccacttcaccacagccgccatggcaggggcagtaggaatcgaacccacaccaaaggttttggagacctctattctaccgttgaactatgcccctattaaaaataataaatggaggggggcagattcgaactgccgaacccgaaggagcggatttacagtccgccgcgtttagccacttcgctacccctccataaatggtgccggccagaggacttgaacccccaacctactgattacaagtcagttgctctaccaattgagctaggccggctaagaaatggttcaggacagagtcgaactgccgacacatggagcttcaatccattgctctaccaactgagctactgaaccataataaaaatgtaatgatggcggtctcgacgggaatcgaacccgcgatctcctgcgtgacaggcaggcgtgttaaccgctacactacgagacctataaaatattgcgggaggcggatttgaaccaccgaccttcgggttatgagcccgacgagctaccgaactgctccatcccgcgataataaaaaataatggcggaggaagagggattcgaacccccgcggcccgttaaggccctgtcggttttcaagaccgatcccttcagccggacttgggtattcctccattattataggtaaatcgctattaattataaaattaaatggcggtctcgacgggaatcgaacccgcgatctcctgcgtgacaggcaggcgtgttaaccgctacactacgagaccattagtaaaacggaggaagagggattcgaacccccgcgagccgttaagcccctgtcggttttcaagaccgatcccttcagccggacttgggtattcctccaaaattatatggaccttgcaggactcgaacctgcgaccgaacggttatgagccgttagctctaaccaactgagctaaaggtcctaaatataattttacaactaataaatagtggcggtggaggggatcgaacccccgacctcacgggtatgaaccgtacgctctagccagctgagctacaccgccttatatagtttgtaaataatatggtggagactagcgggatcgaaccgctgacctcctgcgtgcaaagcaggcgctctcccagctgagctaagcccccataataattacagtatatcgggaagacaggattcgaacctgcgaccccttggtcccaaaccaagtgctctaccaagctgagctacttcccgtataattaacgcgcccgataggagtcgaacccataacctcttgatccgtagtcaaacgctctatccaattgagctacgggcgcatatatttttattgaaaatggtgccgaggaccggaatcgaaccggtacggtgatcactcaccgcaggattttaagtcctgtgcgtctgccagttccgccaccccggcactataaaaatggagcagaagacgggattcgaacccgcgaccccaaccttggcaaggttgtattctaccgctgaactacttctgcatatgcgggtgaagggagtcgaacccccacgccgtaaggcgctagatcctaagtctagtgcgtctgccaattccgccacacccgcaaatggtgagccatagaggattcgaacctctgaccctctgattaaaagtcagatgctctaccaactgagctaatggctcttccatggtgccggccagaggacttgaacccccaacctactgattacaagtcagttgctctaccaattgagctaggccggcaatatgtaagaataaatggtggagaatgacgggttcgaaccgccgaccctctgcttgtaaggcagatgctctcccagctgagctaattctccgatttaaaactgcctggcaacgttctactctagcggaacgtaagttcgactaccatcgacgctaaggagcttaacttctgtgttcggcatgggaacaggtgtgacctccttgctatagtcaccagacatatgaatgtaaattatacattcaaaactagatagtaagtaaaagtgattttgcttcgcaaaacatttattttgattaagtcttcgatcgattagtattcgtcagctccacatgtcaccatgcttccacctcgaacctattaacctcatcatctttgagggatcttataaccgaagttgggaaatctcatcttgaggggggcttcatgcttagatgctttcagcacttatcccgtccacacatagctacccagctatgccgttggcacgacaactggtacaccagaggtatgtccatcccggtcctctcgtactaaggacagctcctctcaaatttcctacgcccacgacggatagggaccgaactgtctcacgacgttctgaacccagctcgcgtaccgctttaatgggcgaacagcccaacccttgggaccgactacagccccaggatgcgatgagccgacatcgaggtgccaaacctccccgtcgatgtgaactcttgggggagataagcctgttatccccggggtagcttttatccgttgagcgatggcccttccatgcggaaccaccggatcactaagtccgtctttcgaccctgctcgacttgtaggtctcgcagtcaagctcccttatgcctttacactctatgaatgatttccaaccattctgagggaacctttgagcgcctccgttaccttttaggaggcgaccgccccagtcaaactgcccgcctgacactgtctcccaccacgataagtggtgcgggttagaaagccaacacagctagggtagtatcccaccagcgcctccacgtaagctagcgctcacgtttcaaaggctcctacctatcctgtacaagctgtgccgaatttcaatatcaggctacagtaaagctccacggggtctttccgtcctgtcgcgggtaacctgcatcttcacaggtactatgatttcaccgagtctctcgttgagacagtgcccaaatcgttacgcctttcgtgcgggtcggaacttacccgacaaggaatttcgctaccttaggaccgttatagttacggccgccgtttactggggcttcgattcgtagcttcgcagaagctaaccactcctcttaaccttccagcaccgggcaggcgtcagcccctatacatcaccttacggtttagcagagacctgtgtttttgataaacagtcgcttgggcctattcactgcggctcttctgggcgttaaccctaaagagcaccccttctcccgaagttacggggtcattttgccgagttccttaacgagagttcgctcgctcaccttagaattctcatcttgactacctgtgtcggtttgcggtacgggcacctattttctatctagaggcttttctcggcagtgtgaaatcaacgactcgaagacacaatgtcttctccccatcacagctcagccttaatgagtaccggatttgcctaatactcagccttactgcttagacgtgcaatccaatcgcacgcttcgcctatcctactgcgtccccccatcgattaaaacgattataggtggtacaggaatatcaacctgttatccatcgcctacgcctgtcggcctcagcttaggacccgactaacccagagcggacgagccttcctctggaaaccttagtcaatcggtggacgggattctcacccgtctttcgctactcacaccggcattctcacttctaagcgctccacatgtccttacgatcatgcttcaacgcccttagaacgctctcctaccattgtccaaaggacaatccacagcttcggtaatatgtttagccccggtacattttcggcgcagtgtcactcgactagtgagctattacgcactctttaaatgatggctgcttctaagccaacatcctagttgtctgggcaacgccacatccttttccacttaacatatattttgggaccttagctggtggtctgggctgtttccctttcgaacacggaccttatcacccatgttctgactcccaagttaaattaattggcattcggagtttgtctgaattcggtaacccgagaggggcccctcgtccaaacagtgctctacctccaataatcatcacttgaggctagccctaaagctatttcggagagaaccagctatctccaggttcgattggaatttctccgctaccctcagttcatccgctcacttttcaacgtaagtcggttcggtcctccattcagtgttacctgaacttcaacctgaccaagggtagatcacctggtttcgggtctacgaccaaatactaaacgccctattcagactcgctttcgctacggctccacatttactgcttaaccttgcatcaaatcgtaactcgccggttcattctacaaaaggcacgccatcacccattaacgggctctgactacttgtaagcacacggtttcaggttctatttcactccccttccggggtgcttttcacctttccctcacggtactggttcactatcggtcactagagagtatttagccttaggagatggtcctcccagattccgacggaatttcacgtgctccgtcgtactcaggatccactcaagagagacaacattttcgactacaggattattaccttctttgattcatctttccagatgattcgtctaatgtcgtcctttgtaactccgtatagagtgtcctacaaccccaacaagcaagcttgttggtttgggctcttcccgtttcgctcgccgctactaagggaatcgaattttctttctcttcctccgggtactaagatgtttcagttctccgggtgtgccttctgatatgctatgtattcacatatcgataacatgacataactcatgctgggtttccccattcggaaatctctggatcaaagcttacttacagctccccaaagcatatcgtcgttagtaacgtccttcatcggcttctagtgccaaggcatccaccgtgcgcccttaataacttaatctatgtttccaccatttttataagtcaaacgttaacatgaagttacgttcttttataaaaagatttaaacgcgttattaatcttgtgagtgttctttcgaacactagcgattatttcttatgaattcaagcttatttaaaactctttattcactcggttttgcttggtaaaatctatattttacttacttatctagttttcaatgtacaaataatggtggagactagcgggatcgaaccgctgacctcctgcgtgcaaagcaggcgctctcccagctgagctaagcccccaaataggtattaaattaatggtgggcctaagtggactcgaaccaccgacctcacgcttatcaggcgtgcgctctaaccagctgagctataggcccattaatttgaatgaacaaacattcaaaactgaatacaatatgtcacgttattccgcatcttctgaagaagatgttccgaatatatccttagaaaggaggtgatccagccgcaccttccgatacggctaccttgttacgacttcaccccaatcatttgtcccaccttcgacggctagctcctaaaaggttactccaccggcttcgggtgttacaaactctcgtggtgtgacgggcggtgtgtacaagacccgggaacgtattcaccgtagcatgctgatctacgattactagcgattccagcttcatgtagtcgagttgcagactacaatccgaactgagaacaactttatgggatttgcttgacctcgcggtttcgctgccctttgtattgtccattgtagcacgtgtgtagcccaaatcataaggggcatgatgatttgacgtcatccccaccttcctccggtttgtcaccggcagtcaacttagagtgcccaacttaatgatggcaactaagcttaagggttgcgctcgttgcgggacttaacccaacatctcacgacacgagctgacgacaaccatgcaccacctgtcactttgccccccgaaggggaaggctctatctctagagttgtcaaaggatgtcaagatttggtaaggttcttcgcgttgcttcgaattaaaccacatgctccaccgcttgtgcgggtccccgtcaattcctttgagtttcaaccttgcggtcgtactccccaggcggagtgcttaatgcgttagctgcagcactaaggggcggaaaccccctaacacttagcactcatcgtttacggcgtggactaccagggtatctaatcctgtttgatccccacgctttcgcacatcagcgtcagttacagaccagaaagtcgccttcgccactggtgttcctccatatctctgcgcatttcaccgctacacatggaattccactttcctcttctgcactcaagttttccagtttccaatgaccctccacggttgagccgtgggctttcacatcagacttaaaaaaccgcctacgcgcgctttacgcccaataattccggataacgcttgccacctacgtattaccgcggctgctggcacgtagttagccgtggctttctgattaggtaccgtcaagatgtgcacagttacttacacatatgttcttccctaataacagagttttacgatccgaagaccttcatcactcacgcggcgttgctccgtcaggctttcgcccattgcggaagattccctactgctgcctcccgtaggagtctggaccgtgtctcagttccagtgtggccgatcaccctctcaggtcggctatgcatcgttgccttggtaagccgttaccttaccaactagctaatgcagcgcggatccatctataagtgacagcaagaccgtctttcacttttgaaccatgcggttcaaaatattatccggtattagctccggtttcccgaagttatcccagtcttataggtaggttatccacgtgttactcacccgtccgccgctaacatcagagaagcaagcttctcgtccgttcgctcgacttgcatgtattaggcacgccgccagcgttcatcctgagccaggatcaaactctccataaaaattatgatgtttgattagctcataaatactaaataatgtttgtaactaatagttacgtttttggaattaacgttgacatattgtcattcagttttcaatgttcgtttgtcacttacaagatttaattataacgcgtaagtttttgtaagtcaagaattatttttaattattttatttctaaaaaataaatttcctaactcaattaattcaacaaatattattttattatgtatttgttcgaatttcaatagtcaaatttacactttattaatattttaaatcaacaacttaaaacatttgttttttaaatattagtgccgtttgacgacttttatataatatcaagttattctagtagagtcaacataaaacaacacttatttttgtttaaaaattactgttgaagggattattttctattcgtaagtactatatgtatttaaagtgtaattccttacgctttttacttcagttttacaaacatacttatcctcactttatggatagttatttagtaaaccttcgtttgaatatttttatgtttatttataaaggatactagttattagttaataccacttccgtagtaagaatgttcttttcttctatttaaatatttttcagaatgagcataaaaaagaatgagcataaaaaagaagttaaacaactttcatgtcgtttaacttcttaaatattacgcttacttatatgaagtaagctaacgcctttttaatttgtcatactaccaaagttaaattatttatcttggcattctttacaaactccataaatttccattcgatgatgtgttacgtcaaagtcagtcatatgctgagctaatctttcaatttcatttaactgtggatattgaaaatcaacaatcttaccacattgttcacatataatatgataatgattatgtgtattaaagtcgaatcgacttgatgagtctccatatgttaattcttttacaattccaatatctttaaacactcttaagttattatatattgtcgcaacacttatatttggaaaatcaggtgaaagtgcttgataaatttcatcagctgttggatgagtatgtgaagaaattaaataacgtaatattgcttgtctttgaggtgtaattcttacgcctgcttgtcgcaatgatgcaattgattcttctagttcatgttcaattgattctatttcaacactcatctatatcaccatctttcttatataataattattattacttactataaatataactgtagtattgcgcgcgtgtcaatatttacatgatgatttcatttaatagccttttttagcatcaacttcattctcaattagaccattcttattgagaaaattaactagattgtttttaaaaatatctaataagtcatactttgcttcataatcattaccagttatatgcgctgttatagttacattatccaattcatataattcatgattaggtttcaaaggttcattttcaaacacatctaaatatgcatgtcgaataactctactttttaatacttctattaagagcgcttctttaactatgctacctcgtcctatatttataaaaagtgcttcatctttcattaattcaaaatgttttttctttagtaaatgaatcgtttcttgcgtttctggtaaagcatttataacaatgtcagcatttggtaatgtgctttcaagtgattcgatagtatatatctcatcaaactcatctttgttctgacctgacttgctcagaccaattaaattcatattaaaagcctttgctaacttcgcagttctagtagcaattgcacctgtacctaaaaataaaactgtttgtcctgataggcgtttaccagttattttcgaatcatatatatgttgtcgttggttatcatatgatagtttcatctttttataatcatctaaaatgaaagccaaaatgtattcagataattgtttagcttgaacaccttttccattagttaaaagtatgccgtgatctgcaatataatctaacggtaatgtatttacacccgttgcaaaccatgcgatccattttaaatttggacaacgtcgtaaaaatgcctcattgataccgccatcataaccaactaatatatctaaattagccaagtcgctctcaggtatttctgatgcttttttataaaatttaaaatctacatctgaaaagcgttgttgtaattcagtttcaacttcacgcatacgattcaacccaacaactttcatatatgtcaccccaaaatgtttttaagttcttctatttgtgttttaactttaaccttctcgataacatctaatactttaccttgttcatctattataaaagtcgttcttacaatgcccatactttctttgccaaatgatttttttaactgatatacgccagtttctttagctaatttaaaatcttcatctactaataaatcgaaattcaatccgtgtttttcaataaaattttggtgttttttctttgaatcaccgcttataccatatactgcaacatctaaatcattgaacatttctaaattgtctctaaagtcacaagcttctgtggtgcaagtaggtgtattatctctaggataaaaatatacaatcgcctttttaccttttaatgtatcatttgtaatgacagttccgtcctgattttctaatttaaatattggaaattgttctcctttttgcaacatataatcacctttttcttcattataataattttatgatacgatattagatgaaaatattaaattaaaagaggttgatataaatgaattttagtgaaagtgaacgtttacaacaactttcaaacgaatatattctaggcggtgtcaattccccttctcgttcttataaagctgtaggaggcggtgcacctgttgttatgaaagaaggacacggtgcatatttatatgatgtcgatggcaataaatttattgattatcttcaagcatacggtccaattattacggggcatgcacatcctcatattactaaagcaattcaagaacaagctgctaaaggtgttttatttggtacaccgactgaactagaaattgaattcagcaaaaaattacgtgatgcaattccatctcttgagaaaattcgctttgtaaattctggaacagaagcagtcatgacaacaattcgtgttgcacgtgcatatactaaaagaaataaaattataaaatttgctggatcttatcatggccattctgatttagtattggttgcagcaggtagcggcccatctcaactcggttctccagattcagctggtgttccagaaagcgtagcacgtgaagtcattactgttcctttcaatgatattaacgcatataaagaagcaattgaattttggggtgatgaaattgccgcagtattagtagaaccaattgttggtaactttggaatggtaatgcctcaacctggatttttagaagaggttaatgaaatttcacatagcaacgggacactagtgatttatgatgaagtaattactgcattccgtttccattacggtgccgctcaagatttattaggtgttatccctgatttaactgcatttggtaaaattgttggcggtggtttaccaattggaggctatggtggacgtcaagatattatggaacaagtagcacctctaggacctgcatatcaagctggtacaatggctggtaatccgttatctatgaaagcaggtattgcattactcgaagtactagaacaagacggtgtttatgaaaaattagacagcttaggccaacaactagaagaaggtttacttaaattaatcgaaaaacataatatcacagctacaattaatcgtatttacggatctttaacattgtactttacagatgaaaaagtcacacattatgatcaagttgaacattctgacggcgaagcgttcggtaaatttttcaaattgatgttaaatcaaggtatcaatttagcaccttctaagtttgaagcttggttcttaacaactgaacatacagaagaagatattaaacaaactttaaaagctgcagactatgcttttagtcaaatgaaataacttttaaggaaatatattttaaattgaattaaaataaaacaaatgctcacatagtagattcattttatatcgttaactattaacgtttaaattgatatgtccctatgtgagtttttattttacaaatttatactattttaatctctgactaaagttttacatcgctatcagtattatgtatgatttattttaacaactataaataagcttgaattttgtaactagtaagtgtataacagtaatgaatacgaatattagatattcaataaacttaaaaggggcgtcattatttttgagactaggagctcggattttcaaaactggtatagccattattttagctatgtctatcgcttctttactaccggatgatgttggtctgaaagccttagctggtgtcagtgctgttgttgcaatgcaacctagtatttatcgttcatttaaaacagtttctgatcaagcattgggtaacattataggtgccatactatctgttacaatggtaacaatttttagtgataattttatcattatgggtgttaccgtcatagtacttattgctattttatttaaatttaatttagcacatgttgctactttggcgagtgtaacagcattaatcattatgggacaacataccggttctttctatattactgccttttacaggtttgtacttgtaatgattggtgtcataagttcatctctagttaactttgtgtttctaccacctaaatttgaaacaaaaatttactataattcattaaatatatcctcagatatttttatgtggtttaaattagtattaaatgatacgacggagtttaataatattaaacaagatagtcataatttaaaacaacgtgtcgaaaagttagagaaaatttatgattactatagcgaagaacgtcctattacaaaaaaacatattcaccaacagaatagaaagaaaatacttttcagagaagtagttcagacgactagacaagcttatgaagtattaaacaaattgtcgcgttatcaaaacgacttatatttacttaataacaatttcctattacaaatcaaattagatttagattcattaactgcttttcatgagcaaattttagctagcctttctaaaaaagcacgttataatgtgacacatgttgattatgagttagataatccgcagaaaaaagatttattgtctacatttcagcatgagttaataaatcacccttatcaaacggaatattcgtttgccaatgttatgcaaattgttgcagccatcgaagagtatcgacaccatttagagcatttagaccgcataagaattagctttttcacatatcatagatctgatgcagacattgaaattgttgaagaagactttgatttataacattaaaacaattcctgtaattaataccacaatgagataaagtaatattgaatctcgaaattaaatttaaaaaagcagtaagattattttcaatgaagaaaatctcttactgctttttctatgttatgacctcaccatcctgttacaaatcttccctacaaaattgtactgaagtcaaacaactaatactttataaattttgaatgctatataaatgctcgtaagcaccttgttttgcaatcaattcacgatgcgtacctgtttcaacaatatgtccattttcaattacgacaattttgtcagcatgtgtaatagtggacaagcgatgcgctacgataagtgtcgttcgatctttactcaacacatctaatgcttcttgaataatggattcactttctaaatcaagtgcacttgttgcttcatccaggataagaattggcggattatttaaaaatattctagcaatcgataatctttgtttttgaccacctgataatttaacacctcgttcacctacttcagtgtcatatccctgtggcaagttcatgataaagtcatgtgcattagccattttcgccgcttcaactacttcttcatctgttgctgttggacgaccaagtaaaatattttccttaactgtatcagaaaataaaatattatcctgttgcaccaatcctatttgatttcttaaacttcccgttaaaaaatctttaatgttgtgaccatctattaaaatttgcccagaagttacatcgtaaaatctcggtattaagttaattaatgttgatttaccaccaccactcatacctacgaaagcaactgtttctcctttttcaatactcaaattaatatcttttaaaattggagcttcgttatcgttatattgaaaactaacatgatcaatatcaatacgaccttgtttaatttcaataggttgagcaccaacaccatttttaatgtcataatcttcgtcaattaattggaatacacggtccattgaagcaaaactttgcgttaaagttgtaaatgatgcgactaaacgacgtaaaggcccgaacaataactccaagtatccaacaaatgctgcaagtgtacctactgtgattgatccagaaatagcaagatatgcaccaacaccgatgacaattattggtccaatatctgtaactgtattaattgcggcaaaagaataggcattccatcttgtatgtttcaacgcacgtgttaagaaattagtgttctttttatcaaagtttttcgcttcattgtcttcaatcgcaaaacttttaacgactgaaataccttgaacacgttcatgcaagaatccttgaacctcagctaatgcttgagatctttcacgcgtcaattttcttaatcttccaaagaaaacgtacaccgttaaaatgtaaaatgggaagataaacagtgctgctaaagtcaatttcacatctaaaaagaacattatggatagtgcaataataattgttatacaatctaaccaaatattcattaacccggttaaaatgaaatcttttgtttgttcaacatcattaatcactctagatattacttgacctacttgattattagcataaaatctcgcacttaaagcttgtaaatggttgtataactttttacgtatatcatacaatattttattacttgtccattgcgccaaatattgacgtataaattcaattggtggtctcactattacaaaaataaataatgcgataccaatggcaatagttaaatgatgaactttttcatcagtcgttaatgcgtggttattaatcacgccatctattgcatatttaattaaaagtggtataagcattggtataccaaacttaattatcccaacaataatcgttgcaaaaatacgatatttgtatggcttaacaaattgcaaatatcgtttaatcatacattcccccctaatctattgccctatcctattcataagcataaaaatgaatagaggttggatacataatttgtagatgtaaattcttcttacaatttacatttttaaaattaagatatctcaacctctgtcatattcatgtgattaaatacgttgtcttattcgtatgttatattctattcaatttaatctatggatactgtgtccccacacgacagcaaaagttatcatacttctttacatcactaagtcaatataaatgatttaatcagtatttacactttatttgcttaatattgtctaatttttttgtaacggtctttccaaactttgataaaatctggcgcaaatgggcccttcttttgttctatccattgttgaagaatgtccacgttgcgtcttaaaataatatcaatatcatgcggataattcatttgattcatatgttgctcatattcatcttcatctaataaatgatactttccatttggatatactttaatatctaaatcatagtctatatattttaatgcctcttcatcacaaacaaatggcgatgacaaattgcaatagtaataaattccatcttctctaaacatgcagataacattaaaccaatattctgagtgaaagtaaacaattgccggttcacgtgttatccaagttcttccgtcactttcagttactaacgtatgatcattgccaccaatgacaacatgatcagtaccctttaatattgttgtttcagaccaaacgcgatgaatcttaccatcatgtttataactctgaattttaatgttttccccttctttaggtatggattctctgaccatactccacaccaccttctgttaatttaaccattataaattatagcatatttcagaaatagtattatataaatacatatttttacgaaataagattttactacttaatgattaaactcggtaatattgctaagtactacaacagagatttacatgtcccatttaaagtatataaaatcatcacttttatatatcaacactttaactttttgacattgttatcctctgagaattgaagataacatttatacatttttaaaattaatgtcactatattttccgataatcttatcaatcatcgaatgttacccatttataaattgataaatctttgacataggtacagggaatgtatattgatctcgatcacttaaatcaaaccaaatcatgtcatctggtaatctttcaatgttaattgttcctgaaacggcgtatacctttatcttccatgttaaatgagtaaattgatgcttcaattcaaaaataggtgtttctactggttgaatgtcatgaccgattttttcagtcatttcacgtctagcatgctcacttttaaacataggaaattgccacataccatgcaataatttttcgctacgcttttgcaacagatattgaccttgattatttctaattaaaaagacggattgctcaattacttttttacttacatttttagatttaactggtaacttttcaaatgtacctttatcaaatgcctcacagttttcttgaactggacaaaataagcataatggatttttcggtgtacaaattaatgcccctaattccatcatagcttgattaaacgttccagcttctgtagtaacatacggtaataattcttgttcgtacgatttcctcgtcgattgtaatttaatatctcgatagtcatcattcaatctagaccatacccgaaaaacatttccgtctacagttgctagtggtacattatatgcaatgctcattactgcagcttgtgtgtatgggccaacaccttttaaagctttaaattgatcaggatctttgggaactaagccttcatatttatcatgaacttccttaattgccgtatgaaaatttcgagctctactataatatcctaagccttcccagtactttaacacttcatcttccgaagcttgactcaaaacttccacagttggaaatcgttcaacaaaacgatgataatagtcaataaccgttttaacttgtgtctgttgtaacatgacttcacttaaccaaatatagtacggattggtcgtttgtcgccatggcatttctctttgattttcatcaaaccagtgtatcaaattttctttaaaactagactgctgatacatttataaaaccctttcctcaccaaaattaattgtctttactcataatgtttttattgtacattaaaatcatggttagtatgtaagttaatttagttatttgcgaaattggattataatagtatatataatattatgaaatgagtgaactgatatggacactgcaacacatatcgcaattggggtgggccttacagcacttgcaactcaagatccagcaatggcttctacgtttggtgcaacagctacaacccttatcgttggttcattaattcctgatggggatactgttcttaaattaaaggacaatgcaacatatatttcgcatcatagaggtatcacgcattccatccctttcacaatactatggccaattttaattacatttttaatattcacgttctttagtggaaccaacccatttcatgtatggatgtgggctcagctcgcagtatttttacatgtctttgtagatatattcaattcttatggtacacaagctcttagacctatcacaaacaaatggattcaattaagtgtgattaacacatttgaccctattattttcacagttctttgtattggtattgtattatgggttgtaggcttgcatccacttgcagtcttctttcctataatcgctttactaatcatttattacatgattcgttttaaaatgagagccgtaattaagcaacaagctttaaaagcaattcaacaagagcatcaccctgttaaagtatttgttgcgccaacaataaaatttatggaatggcgtgtcgcgatacaaactgatgcacatgactatgttggaaaagcatatggtagaaatgtggtgtttagtgataaagttgaacgtcaaaaattatcaacagactccattttatggaaagtcaaaggtaataaagatatacgtacttttttaaacttttcatcaatctatcgttggcaaacaacaacgttagcagatggttctactgaaattcgtttgattgatttgcgttatttaaaaaatgatcattattcatttgtggcaattgcacacgtaacaaaagataatgtcatagaccactcttatattggctgggtatttacagaagataagttacaacgtaaactgtatgctaaataatttcaagttattattcactaaagttaatctataaaaaatgaacaaccgggcagaatgaaaatcaaaacgatttttactctgtccggttttttaatgtaaaactatgaatgcttttacaaaacctaatatttatattgtcgctaacaaactaccttcaatgactcgaaatattaaaatcagtataggaaaacaatatctagattatattctaattatttctgattctcacagattaatttacacaacaagtcagctaaacatcatgaagaagtatccgcctcgtctgtactatcttttgaaacatcttgttgattatcagtttgtgtcactttagatgttttattataaattgcgtgtgtcgtataccttgctaatacgaaatttactgcagctattaaacataagaataaaataaagtaaaaatgatatggaatgttttccatacttgatataccaaatatgatagattgtgctataccattaacaatgtaatacattggattcagcattaggatgtgattgataaatacatgatttggatttggtataaaaataattggcaacactaagaaacacaatacacaaatcccataaaatatgatatttattttttcagttaacagtcgaataagaccaaaagtaactgatattaatcctacaaaaatagttgccatcacaataaaatagaatagcgctatatatgatgtttcgaagtttactggtttaaccaatgcactaatcatcgtcaaaatgactagcataataaaacttaaaatagacataataactactggcgtcgctgcggaaatattaaataacttagtaactaaaaagtcattcatataatgatgataagagatataaattgtgaacatcaataccgcaaaaacaatcaatgcaataagtctaaataaccatcgcacctctttaacatcggtcaaatgactaaaggaaaatagcgtttcacttgcaataataagtattaaacatgcagctaatacgattagaaaacttttccaactttgttttaaacgttctgttacataccttttagtatgcggtaagtttttaaaatataaaataatattatctagcatctttacacctacaattcaatataaatccatttgtcttcttttaaattggcaatacaatatccattcccaactttagtaatccaaatgttattgttaatattaaacttatcttttaattcttttttatctacgattggataaacaaaaccgtataactgattattatcattgaaaagtaattgtatcggttgttgtgtaacggatgcaacgaaacggttatcatcatcaggaactaaagttttaataactgaactatgctttttatgtaattgactgttaaagtatgcatagtaattactataatttgatttcataaatggcgctaattttttaaaactatgcgtttgatataaacctgccgggttaaaatattctaatttatctttactaacatagtaagtcttattatcagcggtaacacgataatttttactattttcaccagtaattgtaactacactatattttggaattgtgacttgtttatccccttgcagatccacactgccattaaaagcaattccataagctaacttttcgccatatggatctttattttcattttgcatcgtagcacgattcgtaaaatctgttatcgaaataattcctatattattgaaaatgagcaacatcatcaatgctaagcctaaaatagtacctgaggctaaagtccaaaaacgcactaaaaacttaggcggttttgcatgattatagcgctcaacgcgtttgaaattataggtcatctccggtattcttgtacgattctttttccaatctaaatcaaagttttcaatttcttcttttgagtttagacttaatcgatcacgttcatgttctttaaaagatggaataacttgtttaagtgacccttccattcttaattgaccatgtgaaaaccaagctatatagttactcacttgtgaaattttatcaatatcatcaccaattgacacaatcgttaaattattttcaatataatcatttgttaattcaatcgcacgttccataaattgtggtgttaaatagtcaataacatgatttaaaataataatatttgattttgatgagcgtgcaatacttaatagtaattgagcgtatgccgctttcgaaatatggttaaccggcttcgttttataatcgcctaaatgtgcatattgaataatctgttcagctttatgattattaatttcatatggaaatagttgaactaactgcgctgtataagcttcaacagtttgatgaattaacgattgatcttcaatatatccgtagaacaaatcttcagtacaaactactttacctttatcgggtttaattgcacctgccaacaattgacctaccatcgctttggaagattcaggttcaccaattatacctaatgcttcaccttgataaatatgtaaactaatattgtttaaatcgatatcttgagcatcatatccaaaaggtaaataccattttttattctgtttattcctatagtagtgtgttacttttagtaactttaaaacaattgaacttcccatctattttcatccttctataattgtaataacgctataggtaagccttcttcgggttcatcactattaaatctaaacccccacgcaaaaataccttttaatctttctactttaaaatattgattactgccatcagtcagtttataaattttaccaatttcaatcttttttctgtctactaagtaactttcggcaacaattactttactttgataaacgtcatattcatttaaaataccattcatctcagcttttctcattttctctttataaagttgtatttcgtgtcttaattctggctcagacatctcactcaatttcttctgttccatcggcaataccactttcttctaatttagctttaattttatcatatttatatccttttctcataaggccttcgatagtttttgaaattaatttttgttgcgtgtacttctttcgatttttattataaattttttctaaatctcgttgtaataaatcgtctaaaaccgcttcatcttgtgtaaaatccatttcattcaatacagcatgaatggtttccatttcaaaccctttttgaattaaagattgcattactttttctttaaccttattttgtggccccttttttgttttagatattttttcagcaatttggataatatcatcaagttcctgttgttctctataaagttctgtaaacatttcaatgatatttggttctataccaagttgataaagtttttgttgataaattttaggtcctttatctgtcgtgcgaatcattgtattttttaaactttccgcataatcttgatggtcgattaacttttcgcgataacaatattcaatcacttcagaaatcgcttgctctgatatctcttctttttgtaaatattgtataacttctttttcagttctctttttatatgataaatattggattgctttatttaaacctatgcgataatgatcatacttttgaatctctgccatgtcagcagcttcaagttgttgccctttttttaaattaaatttgactaatgtatcgatatctatacccatttcaaattgttcatctaaaaaaagattaaaacgttctttgtttttcttttgaacttctattttagtaatcttcggcactggatcaccccgttactttctcaagttttaatacaatactcttttattattcaataagccacttcctatagcaaatgtttaactttaaatatttttcgatgctaacaaaaaatcacactatcatcttttaaaatgaaagtgtgattacaagcaaatctgtaaaatttattaagcagaaacaattcaactttatcattatggcatttcaattataccttctacattattgttccaagtatcttacacatgaatgcaagtatttaacgatttaattgtgacatagcctgttgatattgtgtttcattgatataattttgttgcttcattttttctaagttcgtgcttacacgttgcgtaaaattctcagacatattattgatattatatacgctaggtgcattgactttactagctaaaatagcgctttgtaaaactgtaatgtgagacattgttgtactatttttattcacggttgttccaaagtaatggtttgctgcgccctcaagcgtatattgattatccccaaagtaaatattatttaaataaaagcttaaaatttcgttcttattatattgtttttcaactcgatgagctacaaataattcttttacttttctagtaaatgaacgatcattatcataaaaataatttttgacaacttgttgtgtaatggtactaccaccttgcacatctctgtcgctaatcgttgaaaataaagctctagttgtacctttcaaatcaaatccatgatgattgtagaatcgttcatcttccattgaaataaaggcacctttaacatactctggcatgttatcagctgacacaaaactacttttattttcaatttttcttagttcatccacattatcgcgtgtagataaaaaatacatgataccaataaacaatgcgataatgattagaatggttaataatattttcaatagtattcgtttactttttttctttttcggcggtttgccaactggttgataatacgtattatagtgaggttcgtgtttcatatgctcaaaatgttcatttgagtttgagtacctatcgcttcttttcatgcgtttgctccttcttttaaaactcacttagtatataccttgagtttaccagtactatcacaaataggctacactttttgggaaaatcagtccaagggcttacaatcgtatacgccatcatacttacttttttgttttttgaaaagattatagataaatcattgcgattttaaatattaatcatgtcaaatattgttatattttataaaaataaaagaccatccctattaaatgccaatagagacgaccttttatttgttattcattttttaaaactaaaatccatatttcatttcaaacgaaaatatataaattttaacaatcgataaccacaatacttctattgtaattgtttaacaatttctcgattaaaatcatctaaatcgtctggtactcgacttgttacaatattgttgtctacaactactgactcatcaactacatgtgcgcctgcatttgataaatctttgcgtacatttaatactgctgttaacgtacgaccttttaaatcgtctgtatctattagtatttgtggcccatgacaaatggcaaatgttggtacatcatttttagtaaagtatttagcaaatgtgccatatcgaccttctgtatctccacgtaaatgatctggtgaaaaccctccaggaattaataatgcatcataatcttctggtttagcttctgcaatgcctacatcgacagtaactttttcaccgtgtttaccaaaaacttcactatttgcagtatctccaatcactacagtattaaagccagcattctctaatgcctctttaggacttgaatattctatatcttcaaattcgtttgctagaataattgctacttttttagtcattgaaaatcacctttctatatatcattgatataaatactatagacaagtaaatcagtgattaaacatacaagatataaaaacattaagcgactgtcgcgatatctaactctaacacatcttatgtggcatttacttagatactaatttaaccttttcttcaagctgatctaacaatccaatccattcatctatatcttcaacacgtacttcatcaggatttacatgatcgatatcctcaataaacttatttaaacgcgcttttatctgttcgattgtttgctgttcattcataaaaagttaactccttttattttgttttctttttcattattatcctaacagaaattgcgttaaagcgatataatcttagctatatttatgacattcaaattattttgacttttaaaaatccccttttcaattaactaaaattaagagataatttgttacgagtgataatacgaagtggtatcataccgatatgaaccaaatagaaagaaggaagtttaagacgatgaatagcgtcaaattgaagcaacctgttagcattcacaatgatccatgggaagcatataacgatgttaaagaacatggccaattaactttaagtaacatcgaatttacaactacaaatctttgtaatatgcgttgtagccactgtgcagttggttatactttacaaactgtcgaccccgagcctttagatatggacttaatttatcgtagacttgatgaaattccaaatctgcgaacgatgtcaattacaggtggcgaaccaatgttttctaaaaagtctattagaaatgttgttaaacctctattaaagtatgcacataatcgaggtatatatacacaaatgaattcaaacctaacattgcctcaagatcgttatttagatattgctgaatatatcgatgttatgcatatctcacataactggggaacaactgatgaattcgcaaatgttggctttggcgcaatgaagaagcaaccaccgttaaaagctaagttaaaattatatgaacaaatgatttcgaatgcatgtacattatcagaacaaggaatgtttgtatctgcggaaacaatgctcaatcaaagtacgctaccacatttacgaaaaatacatcaagaagtcgttcatgatatgaaatgtagcagacacgagattcaccctatgtatccagctgactttgcaagtcaattaaatgtgttaactctagcggaaatgaaaaagacaattcatgatatattggatttcagagatgaagatatttggatgttatttggtactttgcctgtgtttccatgcttaaaagatgatgaagatcaaaagttactatcacgtttaagaactgctaaaaatgtaacgacaagaaatgacccggatggccgtagtcgtttaaatgtcaatgtatttacaggtaatgtaatcgtaactgatttcggagatgaaacaggtacaatttcgaatatacaaaaagataaattaacagatgtatttgataaatggttatcctctgatcttgctaaatcattaaattgtcattgttccgagtttagttgtttaggaccaaatgttcttgttaaaaatatgtactatccgaatatggattttaaagataatgagcgtcatatgcacaaacaaccacaaattatacaattttaaaaacgcttaattatgcggagaagcactttatcgataagtagtctccgcatattttaatgctattacaaaataaaaaacaattaattgctggcagcactctacttaaataataaaggtcatttaataggactaatagtctataataaaagggttaaattttaactaaaaacataaatttgcataatcaaaaagacagattgtaggtggaatattcgaacataacagttcaattcatccttaacaatctgtctttatatttttagtctctaatatgttgcacttgagctaaatattcaattgtttgtttactttcaatgcgacgtgcttttcttcgttcaacacgttgtggtgctgtatcataaaaccatttttcaacatcatcttctggatatactccaggtacatgtttaggcttcccttcatcatctaacgcaacaaatgttaagtaacttaatgcagctaaatcatgcttgttattaaatacatcgtcaattctaatttgaacgaccacttccatcgaacttgtcccagcgtatgaaaccatcgctacgtattgtaatatgtcccctgttttaatcggctttaagaaatctactgagtctgtagatgcggtaactacttgcgcaccagcatgtttcatagctgtgattgctgcaatttcatcaatattagccatcaatgtaccaccaaacattgtatgatggtgattcgtatcttgagggaaaacttgtctatttttataacattttgattctgacatagatttcattggtctgtcctgatttgtcattattttatctcccaatctatactttaatcacgtatttgacctttaaatacatgcttcatttcctactcagcacctcaaaataacatttattaaaatgttgatgcccaatttccattttcaaatactagttcttttgaaccatcttcgaatatgccataaatagtcaaatcactactaccaatcatgaagtcgacatgtacgtttgaatcatttaatccgcttgcaatcttttcctcaacagtcatttccgttccaccttgaatattaaaggcgtaagcagatccaatcgctaaatgacatgctgcattttcatcaaataaagtattgtaaaaaatggtattacgatttgatatcggtgaatcatcaggtactaacgcaacttcacctaatcttcttgaaccttcatctgtattgattaaatctttcaataccgcttcacctttttcagctgaaaaatcaataatttctccatctttaaacatcaatttaaattgatcgataattgtgccattataacttaaaggcaatttattagtaacatatccatctactctatttcgatctggtgctgtaaatacttcttcagttggtatattagcaataaaagcttgttccttaccgttaacataacttgtagcatcttcccatatatgatttttcgctaaacctacagttaaatcagtgccttcagatacataatgcaacgcatggtaatttttttgctgtaatttttgtgcgtaaacacttaaattagcgatgtgttgacgccaattttcaactggatcgttaccatcaattcgcacaatatcgaatacctcgtcaataaacttaatatatgcttcttctacagatagttcaggatatactctcttcgcccaagctttagatggaaaagcagctacgacccatggaaattgatttttttgtacactttccatatatcctttaaatgcgcgtgcgttttgttgttgaaatgcttgtaatttttggctatcgataccatccattaaatctggatcttcactaataagtgctaaattagcagcgccacgtttaacgtaatccattctcgcttcaacatcatatgattttatctcatgattagcaaaatgttccacagattcattttcaaattttaagcgttttaaggttggatcgctatatacaacacgtacatctgaagcaccacaacgataagcttcttctacaattaaatgcgttaattctaatgtttctactgatgatctaataaatactggctgttttggttgaacattcataccaaccttaactaatagttcagcgtattgttgtaacttttctttgtaattagtcaaaattcccactcctagtcgtgtcgcaattgtcctaaagcgtcagcaatagctgtcacttcacttggcgacaatctttctcttgattgaacaaaatcatatatatctgttaattcttcttcatttgcatttttatatttttcaggatctaataatccttgattaacaatatttaacttctctctaatagctaatactttctcttcatttgtcatagccacaatgttcacctctaataatagttatgttatcaaagtatcacaatttaataaactttaatagaattttatataatctgctttcttattgtttaaagtcgctataaaatggggatataactacatagtttggaggaatcaaaatggtagatgtagcatttgtctgtcttggcaatatatgtcgttctccaatggcagaagcaatcatgcgacaaagacttaaagacagaaatattcaagatataaaagtacattcaagaggtactggtagctggaatttaggagagccgcctcatgaaggtacacaaaaaattcttaacaaacacaatattccatttgatggcatgattagtgaattattcgaagcgacagatgattttgattacattgtggctatggatcaaagtaacgttgataatattaaatctatcaatcctaatcttaagggacaattgttcaaactgttagaatttagtaatatggaagagagtgatgtaccagatccatactacacgaataattttgaaggtgtatacgacatggtattatcatcttgtgataatttaatagactacatcgtaaaagatgcaaatttgaaagaggggtagttttttatggaaaataaatttgttcctggtattttaattggtgccgtaattggtggtgcaattagtttagctgataaatctacacgtcaagctttagttcaatcagttaaagatgcaaaaaatggtaaccgcactcgtaagccttctaaagtcagcaagattaaagacgaagttttatattggaaagatgttgttgaagaaattcgtcgtaataatcctgaattagaacgttcattaaaggatgcgaaagaaacatttgttaatagaaaaaatcaacgctaagatgattttgtttttataaggtaatacttaacaatttggtgtacgcctttcgtagttatcattattaaatgataatacaatgattggccaaactgcattgtttcagtattgcctttgttttaattttaaatcaaaatagcctatgaaagatttaaatcaattaaattctataatattatcatttttaaagcatatcattgtttagtttttttataattggataaatactaatagttactttataaaacattacatagagaaaggttaaggagtgcacatgtcgaaaaaggaccactcttcttcaaaataccttaattctgttaaggaagcgcaagaggagtcaaaaaagaaaaataaaagtaatcccaaaattgatgttgatcgtacatatattgaacctcaacaattccaatctaagaaacctaaaaaagatgatcaggttttcttcttatcaagattaaataaacctgcaaaatataagaaagactctaatttcttatcatatctcatctatcgcataggaaaagatgatgcctcaggactagcagcgcaaatgacttaccatttcgtacttgctatgttccctatgttgcttttcctattaacattattaccatttttcaatattaagcagagtcaaattactaatatgttaagtaatgcacccgctgaaacatctactctaattaagagtgtaattggtgatataactcaaaactccagtggtggcttattatctatcggtttgattttagcaatttggtcagcttcaaatggaatgactgcaattatgaattctttcaatgttgcttacgatgtagaagatagccgtaatggaatcgtattaaaactactaagtgttgtcttcactgtagttatgggcgttgtgtttgtagttgctctagcattaccaacgcttggttctgtaattagtcatttcctattcggtccacttggatttgacgaacaagtgaaatggatttttaatcttattagaattgtgttaccaatcattattatatttatcgtatttatcgtgttatattcggttgcacctaacgttaaaacgaaacttaagtcagtattaccaggtgcagtatttacttcaattatttggttggctgggtcatttggttttggttggtatatttcaaattttggtaactattctaaaacatatggcagtatcgcaggtatcatcattttgttactatggttatatatcacaagttttattataattgtcggtgctgaaatcaatgcaatcattcatcagcgtagtgtaattaaaggtaaaacacctgaagaagcagcattagaacatgatgacaataataaaaatcattataatgagaacactaggtacgaatatgatgaagatactaatgcaacacatcaacgaacgtatcatgttgacgaacatcctagtgatacctatccagaagatgataaaaatataaaagacaaaatcgttgataagcttaaaaaagactaaataacaacaaaacagaggttttcgctaatgattgcgaagacctctgttttttagtgtatatttgatgttatattgtgattggcgtaagtaacttttcttaattcgataagaactattgaattaaattatgttggaatgcatagataacagcttgtgttctatcttgcacttctaacttacttaaaatgttactcacatgtgtcttaaccgttttaatagtaatatgcgatgcactagcaatttcttgatttgagtaacctttcgcaatcaataataatatttccatttctcgttctgtaagcatttcatataactctgcgcgctttttcatacggttacgcattttcactaaaacttccggttcaaaaacagattctcctctagaagttttacgaactgcatcggcgatatcttttgcacttgttgtttttaaaatgtaactatcgacacctgcatctaatgcacgatatacctctttatcttcaataaaactagttaacattaatactttaatttgcggtaaatcttttttaatctgagtcgtcgcttctacaccatccatgtcttccataagtaaatccattaatattaaatctggcttcaactcatgggctttggcaattgcttctttaccagaagcgccttcaccaactacttcaatatcactttgcgttgatagataacttgaaattcctatacgtaccatttcatgatcatccacaaacaatactttaatcgtcatacgaatcctccttatttaaaggtgctttcacctcgatacgtgtacctgaatctggcaatgatacaatatggaacgttgcaccaatttccaaagctctttcacgcatatttttaagtccataactttgttctaatttttcatcaacattaaaacctttaccattgtcttgaattctcaacaataaataatcgtctttattaaacaattctactgtcacttttgtaccgtttgaatgacgcaatgtattcgaaattgcttcctgtgtaattctgaacaaatgatcttcaatacctttaggcactttaaaatcttgtatttcatgcacaactttcattggcacttttttttgtaaatcaataactaaatctttaataccctcacctaaagatttgtcttttaaaccaagcggtcttaaatgtaacagcaaagcacgcatttctagctgcgaatcttgaaccattttctctaaaatcggaatttgttggtctaatggtggttctaacttcgtttctttgatagcagaaagcatcatacttgccgcaaaaagttgctgactaacagaatcgtgaagttctcgtgctagtctttgacgttcatcttcaataatctttttaactttcacatcattaatattataattttcattggttaagttttgagttttaagtcgcaacttatgcaattcttgatttaaaggtacaagtgtatggtataagtctaacgtttcactatatatttctatattttgatcattaatgccaactgtttcgccttccattgaacgctcaatttgcgtcttaatccaatcattttgctgattgattttgtaagcgagtaccgaaccaacaataatacacaataatatgatgatgagatttaaaaataaaaagactggtattccgaatatttgtgtataaaacataccttgaaaatagatgatatttacaaaaactttatcgatgaacagaaatgcagctagcatgctatatactaagatgagcattgaaccaattgttctaatgtagtggttcatcgataaatcacctctacgtctccgataaacgttgatacgtagatattaactgtatagttatccggtttcatcatttcttcaatatgaatattgttattttcaactttatatgatttttcattcacgtaagtacttccataaaaagcagctacatgtaaattaatattgtaattaaccggcaatataacctgcactttacctaaaatgtgtctaacaacaatggtattattttccttaatatttgcagcttttgttaagtcaatatgtaggtcgccaattccatgttgaatttggacatcttcccacttatatacataaactggtgtacgttgctcaccaaaccacttttgtttaataaaagatggtgaagtcataacctcatccgtcgcaactacttttttgggtttaaacttgtgtattaaataacgcacaataagtagtaataaaaagacgaacaagatgatgattgtatacttattagacaataatgtgaatgcaattaatagcgcgcctatccaaaacgccaaaaggccacgtattttatgaaaataaagatatcctacataaactaatacacatcccaataatagaacgagtaaaaagccaattttttcaaaaaatatgtagtaaaaattggcaataatcattaatgcagtaaaaatgatcaacatttgcgttgatatatatttgtgtgtcatgtttcgccgcctttctatgccacagcgttcatataatttattagatacgatgttttttctgttgctattttttcagttgaagtttgttgaatttgagtttcaatttgtgcataatatgcttcaactttattcaactctgatttaatattttcaatttcttgattattgatttctcttgcacattgaatttgaaatgcttcaacaatatcaatatatttattttctaatgttagcattagactgtcaattaacttgctaagttgttcttttttagtaattaaataatgcatataatcatctaaatttttcattttttcatctaacattaaaaggtagtgcttgatattctttcttactgttgctctcaaaaactgttcaatataacgttcaacatagttcataactatcaccttttataataagttttaaagtaccaaatgcgctatgtatcttcgttgatgtcgatgatatgtttgcttataaactactttattacaacatatttttgaaatgacgcattgattgtgttcttaattattataaaacagttccgaaaccaatatgaataggctccggaactaaatgatgttcatactttagtcttagtatatgttgaactattcttcttcaatctttgtcgttaaaatcggaccatccttagtcacgataactgtatgctcaatttgagcaacaaaacttttatcgctcgtttcaaaagcccattcatttttaccttctgtaacgaatgatgcatttgatgagataaacggttcaatagctaataccataccttcagttaataatgttttgtcttttggatcaaagtaattaagtacatgtgctggcgcttcatgtaatgataaaccaacaccatgacctgttaagtttttaatgactttcaaatcattttgtctagctgtattatgcaccgctttaccaatgttactcaacttagtacccggttttacttttgcaattgcattctcaaatgccatcgttgctacgtcacatactttttgtttcattggatcgtctgattctccaacgacaaatgaaatgcctgtatctgcataatagccattcttcaatgccgatacatcaatatttactaaatctccttcacgaatgacacgcttacttggaatcccatgtgccacctcttcattaacactaatacacgtttgaccaggaaaattttcatcatgaattggcgctgaaatagcgccgtattcttcaaataactctttcgcaatattatcaagctctttcgtagtgatacctggtttggttgcagcttgcattgtattgcgcactttagcgcatatgtatccaatttcttttaacgcttgtaattcttcttctgtttttacaatcattttatcccgttccttttttatataattataacttattatagcaaaaattctttgatatactaaagatgttactttagtattttggaaagtgagtgggacatagtgtgataaagaaaattatttcttaatcgtccccaacttgcattgcctgtagaatttcttttttcgaaattctctgtgttggggcccacaccccaacttgcattgcctgtagaaattgtagatccaatttctctatgttggggccccgccaacctgcacattatcgtaagctgacttttcgtcagcttctgtgttggggcccctccccaacttgcattgtctgcagaaattggtgttccaatttctctatgttggggccccggactagaattgaaaaatgcttgttacaagtgcattttatttcagtcaactactaacaatataacattgtggagcccagagctttgattaatgtatatgaaagtcaaagtaatgcataagcatgattatttcaaatgttttacatacatgaacttttccaatgtacgatactattattataaagcgctcgctaagattttacgatgattagaggttaaaaaatgaacggtcaatggtataaacatttaattggtgccagaacaattaaaactggtattgccatttttttaacggctgtcttttgtatggcactagatttaacacccatctatgccattttaacagctgtagtcacaattgaaccaactgccaaggcatcacttataaaaggttatcgtagattacctgctacggtaattggtgcaggctttgcagtattatttacatatttattcggcgatcaatcaccttttacatatgcattgagtgcgacgttcacgattttattctgtacaaaactcaaattgcaagttggtacgaatgttgctgtactaacatcattagctatgattccaggtattcatgatgcctacatattcaactttttgtctcgaacattgacagcgattattggactcgtgacatcaggtttaattaacttcatggtgtttccacctaagtattatggtcaggtcgaagaaaaattaagtaagacagatgccttgatgtataaattattttacaatcgctgccaagaaattatcttatcaagactgcaatctgataaaagcgaaaaagcatataaaaatattttcaatttaaacaatcaagttgaaacgttaataagttatcaacgtgatgaattaagctatcataagaaaaaagaatgtgattggaaattgctcaatcaattaactaaacgtgcatatacgaatcgtttgtttatcactcatttatcaaatatcatttacttgcctaaaaatactcgtgttaacttttcaggtgacgaaaaaatggcattgctaaaaattagtagtagcatcaaagatattttttatgatggttcatttaagagagaagatgattctgtagaaactttacgttcgacaataaaagcacttgaaattagtggtgaaaatcaaattaaaagtcatatactgtatgaagttttaatgatttatcgactgctagacagcagatatgcataatttaagtgccttatgctaattggaatcattagatatattcttactttatcagtaattttatcgtatatagcatgtccctttttaaaattacaagcatatatattcagactcaaatatagccacacgcctaaactacggagggatgtggctgtcttttttgattgtaattgtgtatcagatttaaatcattaatgtaacgagactaattcattaataaatttagtaaaacctgatttagtaacgtttatccttaacgaaacaccagattctgttaccatgtttgaatgccttaaaccagaatcaaaatcaatataaatacaaagcagttcttgattaaaatcaataatcgtaaaatgtaaatcaggttctataaaatatatttcggtaactggattgtcgtattcaatatattttaaattgtccatgtcactatcaaaaagtgcaaattcaaatttaatttcttgatcttcgaaagttgcactagtgtcgaaataataaattttattatcttcttcgataactacatcttttaaaataaatgttatcgatgttttgctatgtaaataagatgcatcttttaatatcactttagtaggcttcatcgtcaaattcctttcatcattcattttttcatgttgcataatcaccattactattgataattctaggatagatactcattgtataataattattcactagaacaaaaaaacacacatcaatttggttgtttccatccaaaataatgtgtgtgtttatacatatatgattaattactaaacttcatcgtttatcaattttaaacccattgatgcgatgttcagagttaacgagacttcttctgtctatttgctctgtctattaatacttgtttcgcttgcttttccgcttcattatctatttctttaggctcaaacggaatacccttacgttcacaagctttttctaacagataatcagttatttcgtaatttttaggtaaaattggtccgtgtaaataagtacctaataaatttttataatgaatgccttcttttttatcttcatcattattaccataaccaaaagtaacatgaccaagtgtaccgaaattatgatatgttctaccaccgtgattttcaaaacctacaatagttccaaaagtatcactttcgataacaatatctcctgttaatcggtttgtctttgattcagtataaaaatctaaaatacctaacccttctaattctgtaccatcaggcgtgatatatttttttcctaaaaattgatagcctccacaaatcgttaatcccggcataccatcttcaatcgcttctttaagtggtgtcttaattttacttagttcttttgttgctaatgcttgttctctatcacttccaccaccgataaagaaaatatcacattcatcaaaggtaataccttctgtttcattgatttctacgacattaactttaatatttcgtttttttgcacgttgtcttaaagcaataatatttcctatatcactgtataaattcaatttatctgacataaaatgataaatagtcaattcatgcatattatgattgacctccttcaaacgaacggtttaattgttcaagcataggcgctaatgatgtatagtttggtattgcaactgtgaaacctttataatccatagtctttgccgttgctttataaatatcacgctcaactataattggtacttcaacctctgctaacttcaatcgcaattgaagttcttctgctcgtgtacctgtcacgatgatagcttcaatttgttgcttagataatttttcgaaatctgcatcataaatccatgaagtatctcgaccatctgcagcgttatcatttagcgaaataacatacactttttcgccttctaattgttcaccaactgataaacttgcattcattcctgcagggtttttagctaaattgatcatcgcttcttttcgttcttttttaaagtactgcatacgaccattgtctgatgtatacgtttcaaagccatttttaattgcttgttcatttaaccctagctctcttaaaactgtatatgctgctaacgcgttataagcgttaaagtcacctgctattttcatatcatatttttcatcattgatatttaaatgtaaaaacggtgccacatcaaatcttgatatttcatattttgcttgctctcgtttgaaaccacactgacagtgataatgaccaatttgattataatgaatataatcatattgcaataagcgaccacagtttggacaatatctactttcattcatcgtactttgttcaaattcatgggcatgtgctttcataccatagtacacaatcgtatcacttgcgattttcaaacgactcacaaatggatcatcaccatttagcaataatttgatgcctttattactaattgtctctgcaatgttattaaccataatatcaatttcaccgaaacgatccatttgatctctaaagaaattagtaaataccatcattgaaggtgtaacttcttttaacacacgtggaatcgaaccttcatcaatttcgattaccgcaattttagtcttaggtgttgattgcatgatgaatgcagaagttatacctgcagccatattagcaccttcattattgtgtataatttgaatattattcgcttttaaagtatgtccaattaagtttgaagtcgttgttttaccatttgttccactgataaatacaatatcatcaacttgctctgctaattttcttaatatatctgtatccacttttctagcgatttgtccaggtaaatctgttcctcttttacctactgctctacttgctttacgcgccaatttcgctagatggattgccgtccactgtctcatgtgtttcctcctcaaatttccactcgcatcattataacatgacaaggcaacttcaaaaaagtttctcaatcacaaattgatacagtgtttctaaattataatcattctcatttagataattaaaaatgatatttattctcaattaaatctcggtaaatgatacattttctcaattagagtgctaaaatcagtcattaaattataattattattatttacaattgagaatgagtttgttatactaagtttaattcatagtaattttaatttacaaataagaggtgtatcaaaatgttaagtaaaaatttattagaagcattaaatgatcaaatgaaccatgagtactttgcagcgcacgcatatatggcaatggcagcatactgtgataaagaatcgtatgaaggatttgcaaacttcttcattcaacaagctaaagaagaacgtttccatggacaaaagatttataactatattaacgacagaggtgcacatgcagaattcagagcagtttcagcaccaaaaattgacttttcaagcatactagaaactttcaaagacagcttatctcaagaacaagaagtaacaagacgtttctataacttatctgaaatcgctcgtcaagataaagattatgcaactatctcattcttaaactggttcttagatgaacaagtcgaagaagaagcaatgtttgaaactcacatcaattatttaactcgtatcggcgatgacagcaatgcattatatctttacgaaaaagaacttggcactcgtacattcgacgaagaataattaaacatcactacaatagacagataaatatcatacgacatgatagacatttgggtcacttacaataacccaatgtctatattattttgctttacggagatcactagattcattttctgaatcattgatctgcgttttttcattttcaaggctaattattgtatttttagtcatttgttttttaaactactaatgttaataactctaaatttaatgttgtattaatttgaccgattttaaagcatatcatcatttactttttaatcagagttacatccaaatgatagatttcacgttataccttcacgtataatattatgtatcgtttgtaagcaaatgactaaaaagtttattaatatatacatttaattaattgaaaggattgactacatgatacaagatgcgtttgttgcacttgattttgaaacagcaaatggtaaacgtacaagtatttgttctgtcggaatggttaaagtcattgatagtcaaataacagaaacatttcatactcttgtgaatccgcaagactatttttcacaacaaaatattaaagttcatggcatacaaccagaagatgttgaaaatgcacctacgtttgactacgtatttccatatatgatgcaatttattgcagatttacctgttgtcgcacataacgcggcatttgatatgaacgtcttacatcaaagcattcaaaatattggtttaccaactccaaatttaacttacttttgtagttatcaacttgctaaaagaaccgttgattcgtatcgatacggtttaaaacatatgatggagttttatcaattagattttcatggtcatcatgatgcattgaatgatgccaaagcatgcgcaatgattacttttaggctactgaaaaattatgaaaacttaacatatgtaactaatatttatggtaaaaatctaaaagataaaggctaggactaaataaaatactcccttcaaagtaagcattgtaaaaatgtaaactttgaagggagctttattttatataaagtcatatatcgtcatatttttataagttgattgttctaaattacctacagtgacaccaataagtcgaattggtacatcagggtcttttaaatcgttataaagtaaatatgcaatattataaatatcttcttcagaactaacagaatctcttaaactcatctgtttagataacgtttcaaattgataagttttaattttaaccgttacagttttagccgacttctgtaatttatttagacgttcagctgttttacctgacaactcccatacttttcttaaaatctcttcatcatcattcacgtctgttgcaaatgtgcgttcagtccctactgattttcttactcttgttgatttcacttcactatggtcaataccgcgtgccttgttatataaaccccgacctctttttccaaacaaacgtattaattcaaattccgttttctcatataaatctctaccgttaaaaataccattatcatgcattacttttttggaagctttacctacgcctggaaaatctccaatatccaatgtcatcaaaatatcatggacatttcgataatcaatcacagtcataccatcaggtttattcataccactcgctaatttagctaaaaatttgttataagaaacacctgcagatgctgttaaatgtgtctgctctagaatatcttttctaatatactgagcaattttcgaagcaggaaggtctggtctcactaattctgtaatatctaaatacgcttcatctaatgacatcggttctaccttatctgtataactacggaaaatagacataatctgcgcagatgtttctcggtaagcaccaaaattacttgtgacaaagtatccatttggacataatttatgcgcttgtgacataggcattgctgaatggacgccgtattttcgtgcttcataagatgccgtagagacaacgcccctactacttgctttaccaccaacaatgactggtttccctttcaatttggggttatctctcatttcgacttgtgcaaaaaaatagtccatatcgatatgaataattcgtctctcagtcaagtgctcacctccctactaatttttacttttataacgcacaaaaatatctcaacataattatacgctgtgtacgatttttttacataaatcttgcacttagcgataactatattgagataactacaagttgttataaaatcaattgctatttaagcatgatgatgaagacgattgagtaagaaaacataggtaatctgaaataattcaagcaaattcattttgctggtatcatcatattaaaatttattattgagtcggcttttgatgatacaaataaatactatcttcatcttgttgaacatatttaaaactactagatattgttaatgcaacaagcagaatatctataaagcaataagcggtatgcatactaaacataaaaataagtgatgaataaccaaataccttaattaaaataagcaagccagcacttaataggattagtggtgacagcataataattgagaattgccatttgttgaagcaagcatctgctgtttggaataagattctgtctttttttatattaaacataggtttgctatcttttttaaataacagaaataatgctctatggataagttcatgtaaaatcaataaaataatgaatccagcaaacccatatacaagattgatgatgatattttgatcgacaaccgctgtgacacctaacgcccacttatacgtaaataaaatcacgaataacgcaataacaagttgcaagataataaaccttcgcatttgaaaattatttgtcgttaaatcaattttatgcattaccaaccctcccgatcatgacattcttattcttctttaaatatagtatacaatgtcacatttaatttaaaaagttcatatcaagaaagtaaattggctgtaataaaattttaatatacgacttctttcttcacttattaaggcgaaattttatctcaaatcatgtgcgctatttcaaattgaataatgccactgtctcaacatgtgttgtttgtggaaacatatctaccggtgttacctcttcaagttgatatttttcagctaataataatgcatcacgttgctgtgttgagggattacatgaaatatagacaatacgcttaggttctaatgtaagcaaagtctgaataaacgtttcgtcacagccctttcttggcggatcaaccattacaacatctggtttaatcccttgtgctttccattgtaaaataacttcttcagctttcccacagacaaaagttgtattattgcattggtttatagtcgcattttgttgtgcgtcttcaattgcagaaggtacaacttcaacaccgtatacatgttttgcatgtggtgccatatatagtcctattgttccaataccacaataggtatctaatacaacttcattacctgtcaattgcgcatactcaattgctttattatataatttctctgtttgttcagaattaatttggtagaatgactgatcacttattttaaatgtactatctgttaattgatcaataattgtatctttaccatatagcgttatagactgacgtcccataataacattagagtggctatcattaatgttttgtttaatgcttgtcacattaggaaatgcatctaatatcttctcaacaacagcatttttttgtggccaatttttaccattagttacaaaaataaccatcatttcgtctgtatgatatcctgttcttacaaccaaatgtctcattaaaccttttttcaattgttcttgataaatacttacatttaaatcttttaaaatagatttaacttcattcatcacttcttgatgttgtgaatcttgtattaaacaacttcccatgtcaataatgtcatggcttctttgacgataaaagcccataataacttcattctgttcattcttaccaactggaatctgggacttgtttcgatatctccaaggatctgtcatgccaactgtatcgttaatcttagaattatcaaaatgcgcttttcgctgaaacaaattaatcacttgttcctttttcatttcaagttgtgcttcgtatgataagtgttgaagttggcacccaccacaacgttcataatatatacatggcggtgcaacacgattctcacttctcgtatttatattaagcaacttacctatcgcaaagttcttttttactttgataattttatattcaatttgttcattaattaaagcttgtggtatgaaaataggaaagcgatctatttttacgacaccatgaccttcatgcgttaaatcaacaactgttcccgttttaatgtcatttttagctattgcttgcaaaattttacctccaaaatgaacaggttaggaacaaaattatgcgcttcctaacctgccattatatatttcactacttctgtttattcttcgattaaattgtcatcaacatgatcattatttattaactcttcatttacaatatcatttggtgcaaagacatctatatgacgttctagattcaagaaattcgctggtaatttaccaccatattctccatctacatttagttgtaagtctgtgaatgatgaaatattaattgcctttgctttttcataaataactttaggatgcttagtatgttctcctcttgaagctaaagtcataatatgaccaagttctgcaaggtttgatttttcaactataattaacgtaaaatagccgtcatctaacttagcgtccggcactaatttttcaaatcctgccattgaatttgttaaacctaaaaagaataataatgcttctccttggaaaacattaccatcatattcaattcttaaatctacagctttcatttgaggtaacatttcgaaacctttgatgtaataagcaaatggaccaacaatagatttcaatttactcggtgtttcataagagacttgcgtcaattgtccgcctgcagctaaattaataaagtatcgattattcattttaccaatatctactttagtagaatgaccttcaatgatgacatcaagtgcccccatgatgtcattaggtatatgcaatgcacgtccaaagtcattaacagtacccataggaatgacacctagcttaggacgattaggcttttctgcgataccattaactacttcatttaatgttccgtcaccacctgcagcgattaatacatcataattttcatgcatagctctttctgcttcaagtgtggcatcacctattttctcggttgcatatgcactcgtttcatatcccgctttttctaattttattaaggcatcaggtaattctcttttaaattgctctttacctgatgtcgggttataaatgattctagcacgtttcctcatatcttatccctctacttaaaattcatatattttaacttcatcttggtttcgtctaataggagtgggacagaaataatatttaacaaaatttatttcgttctaccccaacttacattgtctgtagaatttcttttcaaaattctctatgtttggggccccaccccaacttgcacattattgtaagctgacagaaagtcagcttctatgttggggccccgccaacttgcattgtctgtagaatttcctttcgaaattctctttgttggggccccaccctaacttgcacattattgtaagctgacagaaagtcagcttctttgttggggccccactagaattgaaaaaagcttattacaagcgtattttctttcagtcaactactgccaatataacattgtagtgcctaggacattgaatttatggcccaggatcagtcttatctcatcattcttaatatcgttaaagaccaacttgtatcttaaacaaatactatctcaatatgtacaaaggttgttatttattcagcattttttgccgttcttcgttatatagacttcgtcagttatgctattttacctttaaaatgatgttgtaaatataatgttgtctttatacaaaaatgttttatacctttttattatacagtttgccttaatataattaaagctaacgcattaataaaattaatatttttaccattaacatgtacaatgaataaagttaaaagtaatatgacttctatagatataaataaaccctcgattgcatctaagtcagcaaccaagggttcattgttatatcatcatagtctgatgaatctaattatcttttatctaattcttgttttaatagttgatttactaattgtggattagcttgacctttagacgctttcataatttgaccaactaagaagcccatagctttgcctttaccatttttgtaatcttcaactgattgttcgttattgtctaatgcttcatttacaaattttagaagtgttgcttcatcagaaatttgaactaagccattatcttccataatttgtttagcattaccacctttagctgctaactctgggaagactttcttcgcaattttactgctcattgttccgtcttcgataagtttaatcatacctgctaaattttctggtgttaattttatatctaataattctacttgatttttatttaaatattcgtttacgccacccattaaccagttagatgttaatttaacatctgcgccgtgttcaattgttgattcaaagaaatctgacatttctttagtcaatgttaatacgtgtgcatcgtatgcaggtaagcctaattcatttacatacttagctttacgctcatctggtaattcaggaattgtctgacgaacacgctctttccaagcatcatcaatatataaaggtacaatgtcaggctctgggaagtaacggtaatcatcagaaccttctttaacacgcattaaaattgttttacctgtagattcatcaaatcgacgtgtttcttgtccgatttctccaccacttaacaattcttcttcttggcgtttttcttcatattctaaacctttacgtacatagttaaatgagtttaagtttttcaattcagctttagtaccaaatttttcttgaccatatggacgcaaagagatgttagcatcacagcgtaaagatccctcttccattttaacgtctgatacaccagtgtattgaataattgaacgtaatttttctaaatatgcatatgcttctttaggtgaacgaatatctggttcagatacgatttcaattagtggtgtaccttgacggttcaagtcaactaatgaatactcacctttatgcgtcgacttaccagcatcttcttccatgtgaagacgagtaataccgattcgttttgtttcaccgtcgacttcgatatcgatatacccattttcaccaattggttgatcaaattgagaaatttgatatgcctttggattatctggatagaaatagttcttacggtcaaacttagattctgttgcgatttccatatttagtgccattgcagcacgcattgcccagtctactgcacgcttattaacaactggtaagacacctggatatgctaagtcgataacatttgtatttgagttaggttctgctccaaaatgcgctggtgatggagaaaacatttttgagtccgtttttaactctacgtgaacttcaagtcctataactgtttcaaaatgcatgatttccactccttataatttttcataaacgtcatgtaaattgtattgtgtttcatattgataagcgacacgatataacgttttttcatcgaatggtttaccaatgaactgtaaaccgattggtcggccatttgattgtccacaaggaacagaaataccaggtaatccagctaagtttactggtgttgttaataaatcattggcatacattgttaatggatcatcaatttcttcacctaaattaaacgcagttgtaggcgctgttggaccaactactacatcataattttcgaatactttatcaaagtcatttttaatcaatgttctaactttttgagattttttatagtaagcatcgtagtaacctgaacttaatgcaaatgtacctaagaaaatacgacgttttacttctttaccgaaaccttcagatcttgacattttatataattcttctaatgaatgagcttctttagaatgataaccataacgaattccgtcaaaacgagaaaggtttgacgaagcttctgatgatgcaatcacgtaatatgatggaataccaaatttagtatttggcaatgatacttcctcaacgacagcacctaaagattttaaagtttctacagcgttttgaactgcttcttttacgtcatcagctacaccttcacctaagtattctttaggtaatgcaacttttaatcctttaatatctttaccaatttcagatgtaaagtctacatcatcaacaggtgcacttgtagagtcattagcatctgcaccagaaatagcttctaatacgattgcattatcttttacatttcgagtcaatggaccaatttggtctaatgaagatgcaaatgcaactaatccaaatcgagatacacgaccgtatgttggtttcataccgacaacaccacaatatgcagccggttgtctaattgaaccaccagtgtctgaacctaagctaaatggtactaagccagctgcaactgctgctgcagatccacctgatgaaccacctggtactgctttatggtcaaatgggttaactgtttttttgaaataagatgtttctgttgaaccacccattgcaaactcatccatatttaatttaccgattaaaacggcattctcattatgtagtttttccattacagtagattcgtaaattggcacaaaaccttctaacattttacttgcacatgttgtttctaatccgtttgtaataatgttatcttttatacccattggaataccaaataatttgccatccatttggtcttttgcttgtaattcatccaattcttgcgcttttttaattgcattttctttatccagcgctagaaaagacttaattgttggatcagtctcttcaattgcatcatatatatctttaacaacatcagatggtttgatttttttgtctttaattaaagttaataaattctcaaccgattcgtagcgaatgctcatcttacgcgtcctcctcattcatgattgtaggcactttaaattgtccatcttctgtttctttggcatttttcaaagctaattcttgcggaatacctttaattgctttatcttcacgtaaaacgttttgtaaatctaaaacgtgatatgtaggttcaacgccttctgtatcagcgctatcattttgttttgcaaaatctaaaatgctttctaatgtgttggccatttcttccgtttcttcaggagaaatttgaagtcttgcaagattcgcgatatgctcaacttcttcacgtgttacttttgtcattaataaaagcctcctttaagtcattcatcactaaattgtatcaaatttccaattaaaaatctaagtatttatgaggtactactttaatttcatataaactgtataaacattatcattcgtttaccaaatcattttttatgaaaacaacacccttttattattagacaacccaattcaatattatgattatgcaattttaattataaaaatttgctcatatctaaaaaatacgaaagcgttttctatattggtatacaagtatttcaaaaagaataaatttaattttcctacttttctaaacatttatctttatgtataatgttttcaagtaactaaattataaattaaataaagggagtgtttatcatgcttacaatggggacagcattaagtcaacaagtagatgccaattggcaaacttatattatgattgccgtctacttcttgatactaatcgttattggcttttacggttacaagcaagcaactggtaacctaagcgagtacatgttaggcggacgtagtattggaccgtatattactgcattatcagctggagcttcagatatgagtggatggatgattatgggtctacctggttctgtctatagtactggtctttcggcaatgtggattacaatcggcttaacattaggtgcttatataaattactttgttgttgctcctagacttcgcgtttataccgaattagctggagatgcaattacattaccagatttctttaaaaatcgtttaaacgataaaaataatgtgttaaagattatttctggattgattatcgtagtattctttacattatatacacattctggtttcgtatctggtggtaaattatttgaaagtgcttttggattagattatcatttcggtttaatattagttgctttcattgtcattttctatactttctttggtggatatttagctgtatcaattacagatttcttccaaggtgtcattatgttaattgcgatggttatggtccctattgttgctatgatgaatttaaacggctggggaacgtttcatgatgtagcagctatgaaacctacaaatttaaatttatttaaagggttatcatttataggaattatctctctattttcatggggattaggttatttcggtcaacctcatatcattgtaaggtttatgtctattaaatcacacaagatgctacctaaagctagacgtttaggtattagctggatggctgttggtttattaggcgctgtggctgttggtttaacaggtattgcattcgtacctgcttatcatattaaactagaagatcctgagacattattcatcgtgatgagtcaagtactcttccatcctcttgtaggtggtttcttacttgctgcgattctagcagcaattatgagcaccatttcttcacaattacttgtaacgtctagttctttaactgaagacttttataaattagttcgtggtgaagaaaaagctaaaacacatcaaaaagaattcgttatggttggacgtttatctgtattagcagtagcaattgttgccatcgcgattgcatggaatccaaacgacacaattctaaacttagtaggtaatgcttgggccggatttggtgcatcgttcagtccacttgtgctatttgcactttactggaaaggtttgacacgtgccggtgctgtaagtggaatggtttcaggtgccttagtcgttatcgtttggattgcgtggattaaaccattggcacatatcaacgaaatattcggcttatatgaaattattcctggatttattgtaagtgtaatcgttacatatgttgtaagtaaacttactaaaaaacctggtgcatttgttgaaactgacttaaacaaagttcgtgacatcgttagagaaaaataattcataagtcttaacaaattaaaaaggtactaatgttaatcaaaattatgactaacattggtacctttttattatctttaatttacaattaattactgtaaatatgaacttgcggttctttgtcatcttttgtcttactaattaaagcacgtggttggttaccatctttaatccgaatttcatagttatcgattttatcgaaatatttattcgcttgttcagtaacgtactgtgtaataccaattgtttcagcttgtccatagtaatcgattggtaaatctactactaatcgttgtggctttttatcaacaaatttaacttttcctactgcttgtgtgaaattagaaaaatatgattgcaaattatcattaaattgcttgaaattattatttaaattttcatcataatctgctgctgttgaagaaggtaataaagctgatttttcattgatattatgccattcattaagctttgtttgactcttttctgcagtcgcttgagtgataaattcacctggtgtgattgaatcttcacttgattgcttataaattgcaaaatgaattggtatatcttttaaatcatcattttcacgtaaccttgataatatctcactagccatttgtttaccttgctttttaacttcgctatcatctagttttttactaaaagtcggtccatctttttcttttttatagtaataaacactattcatagctaaaccaatcgtcatacctttaatattcttaccttttgtatctccaccaccataaaaatcttgctctaaaatgttagataaataggctggtgatttttctgcaatcttttcaggatctgtttcaccttcgtgtgatggattaagtcctaaattttcattcgctttcttgtcttttttatctttttcagacattttatcgatttcacgttttgtatacttaggatttaaataggcattaattgttttcttgtccaaaaattgaccatcttgatacaaatatttgtctgttggaaacacttctttacttaagttcaataaaccatcttcaaagtcgccgccattataactatttgccatgttatcttgtaaaagtcctcttgcctggctttctttaaatggtaacaatgtacgatagttatcaccttgtacatttttatccgtagcaatttcttttacttgatttgaactattgttatgtttttgattatcttttccagcctggtcatccttatggttaccacaagcagcgagtataaagatagctgtaatcaataatactaatgtacgcttcatcgacatacccctctaactatttaattcattttgcttatctacaaattgttgctctgtccaaatttcaatacctaaactttgtgcttttgttaattttgaacctgcatcttcaccagcaataacgacatctgtatttttagtaacgctacttgtaactttagcaccttgtgatgcaagccatttagatgcttcattgcgtgtcatttgatgtagcttaccagtcagtactatcgttttaccactaaattcaggatgtccttcaatatctgatgttttgatacctttataaatcatattaacatgtttatcttttaatttttgaattaaagcacgaatatcttcattttctaaataagtaactacagattgtgctactttatcacctatatcatgaatttctactaattccgcttcagttactgttagtaatcgatctatcgtttcatatttttctgctaacacttggctcgctttaacacctaaatgcctaatacctagaccgaataataaattttctaaagagttgtcctttgcttgttgaatggcagctaataaattatcaacttttttctgccccattctgtctaaaggtaataaatcttcttctgttaaatagaaaatatcagcaacatctttaattaattcgctttgataaagctgttgaataattttagtgcctaaaccatcaatattcatggcttgtcttgatacaaagtgaatcaatccttcaacaagttgtgcttggcattttggattaatgcaacgaagtgctacttcgccttcaatacgtactaattcatgtccacaacttggacaatgggttggcatatgatatgtgacagcatcctcaggtctacgttctggaatactacgtacaacttcaggtatgatgtcacctgcttttttcactacaacactatcaccaattcgaatatctctgtcatgaattaaatcttcattgtgcaaggatgctcttgatacagttgtaccagctacttttactggttctaaaatagcagtaggtgtgactacacctgtacgtccaatacttaattcaatatctaataatttagttaccacttcctcagctgggaatttataagcaatggcccatcttggtgatttttgtgtgaatcccatttcgtcctgctgatctaaatcattaacctttatcacaataccatcgatatcgtatggcaatgattccctttggcttgtccatttttcaatatattctaaaacgccatcgatatcgctgacgcgcgctctatttttattcgttgtaaaacctaatttatctaactcatctaatgcttcactttgcgaacgcgcattgaaatcggtgaaatcattgacactatatataaatacgcttagctttcgttttgccgttaatttagaatctaactgtcttaatgaccccgcagctgcgtttcttggatttgcaaataactgctcatcatttttttctttttcttcatttaatcgtaaaaatgaacgtctcggcatatatgcttcaccacgaacttctacatttaatggttctttcattttcaaaggtatcgcatgaattgtttttaaattttcggtaatatcttcacctgttgttccatcaccacgtgttaaaccttgaacgaagtatccatcaacatatttcaatgatactgctaagccatcaatttttaattcgcacatatattcaacgttgccaatttgttcacgtatgcgttggtcgaattttctcaaatcatcctcattaaatgcattccctaaacttaacattggcgtgtcatggttgactttattgaaagaggcttgggcttcaccaccaactctaaccgttggagaatctacagtcttaaactcaggatgctcctcttctattttaatcagttcatgaagtaatttgtcatattcactatctggtacagatggattatcctctacatagtattcataactgtattgatttaataaatcatgtaactcgttcacacgagacgataaatcagccatcccttaatcctcctttttttcaattggtgcaaattgcgctaacaaacgttttggcccttgtgatttaaagataatatctagttcgattgagccatttttctcgtttacattactcaccatgccttctccccaggctttatgcatcactttgtcacctacattccaatcagatgacgatacttgttttttcgttgacgttgttcgttgactaaatccacgtttagcaaaaggttttgccttaggttgtatcgtttgtcgtttgccacttgaatgattttctaatagtgattctggaatttcctttaaaaatctagatggcatatttgactgagggcgaccaaataacattcttgatgtcgcatgagtgatgtataacacctcttcagcccttgtgattgctacataacaaatacgacgttcttcttgcatttcatgatcatcttcactcttaatcgctctaatatgtgggaataaagattcttccattcccattataaagacgattggaaattcaaggcccttagccgagtgcatcgtcattagtgttacgccattttcagtatctgcctcatcaatatcagctactaacgataaatccgttaaaaagttaattaatgactgttcttctaatggggtattttcctcatagtcttttggtactgacataaattcatcgatgttttctaatctacttcgagattctagtgtattttcacgttcaagcatttctcggtagccagacttttgtaatacttcatcaactatttcatgaatttctaaaaattcttgttcttttatcaagctttggattaactcgtaaaaattaagacactcttgtgtcaccttttttgacaatccgataaaatcagcttctccaagtgcatcaaacatactgatattgttttgaagtgcataattttgaactttttcaacagatgaaggacctacacctctttttggaacattaataatacgttgcaaactaatgtcatcattactattggcaattatacgcaaataacttaataaatctttaatttctttacggtcatagaacttttggccaccaaccattgtgtatggcatattagatttcatgaatgtttcctcaagtacacgtgattgtgcatttgttctatataaaattgccatatcttgatatttcttaccattacgttgatgcttcataatttctcgtattacaaattccgcttcatcacgttctgtcattgcttcatagtaatgaattttctcaccattcgtatttgcagtccacagtccttttggcttacgttcagaattatttttaatcacttcgttagccgcatttaaaatcgttttcgtcgaacgataattttgctctaaaaagattgtattcgcttctgggtagtctttttcaaatgataagatattttgaatatcagcaccacgccaaccataaattgactgatctgagtcacctacaacacataagtttttaaacttacttgctaataatttaactaatgtgtattgtgctttattggtatcttgatactcatctacatgaatatattggaatttgttctgataatattctagaacttctggtacacgctcaaataagttaatcgttgtcataataaggtcatcaaaatctaacgcttcattacgtgacaattggcgttgatatccactataaaccgttgctaccatttgcgagtgataatctgtggcttctttttgagcatctgcaggtgttttaagttcatttttcaaattactgatcgcaccgataaacatacgtggttcaaactttttactatcaatattttcattttttaagacgtctttaataacagatttttggtctgtaggatcaattatcgtaaaattgcgttctataccaattcgatctgcatcacgacgtaaaatacgcacacacattgagtggaatgttgacatccaaatcacttctgcttgatcacctactaatttttgaacacgttctttcatttctcttgctgctttatttgtaaaagtaatagccaaaacattgtatggtgagacatctttttcgtctaataaataagcaattctatgtgttaaaacacgtgtcttccctgaaccagcacctgccataattaacaatggtccttctgttgtctttacagcttcactttgctctgtattcatatgatttaataacgcattcatttactagactcctttatttttactgtttttaaagcttttttaatatctttataaataatatcaccgacgataattgtatctgcaatagctgccatctctgtcgcttgttgttctgaggaaataccgccaccataaaaaagttgcgtttctgttagatgttctgagacagcttgaacctttgatacgtcgccataaatgccactatactctatatacataaccggtaatcgatacagatgattgaccatttgggcatatgcttctaaatcttctgttgttaaatctgtatttgctttggtatgttttgccactttgctatcagcattgcacacgacatacccttcaaatattacttcttcaaaatctatactatgtccatatgttttaagcgcttctaataatgtaccattgtgaaatgcaacatctgtactgttcagtactgtaggtacaaaataaaaatcaaaaccaggcattacactttcgatgtttgatatttcaagtactaaaggcaatgggtatcttcttaccctgctcattaaatgaatgacattatcttcagtaacgtcatcagttccaccaatcataattgcatctgtttgagacatacaaatcgcatctaaatcatcatctgaaatatgcttagctgggtctaatttaaaaatatggcgccattttttaatgtcatacattttccgaaactccttttttaacatacatatgattatagcatttttaagtgtcgagttctaaagacttaatatgaaatttaagttcttttactctgtaaattttttcgtgaaaaaacaatgattatctaccttattagtacagatagataaccattgtttatcgttcgtttatcgttcatttattattcatttgtttcaatattcatacgatctaaaatcattgtataagcatcattaccccattgtaatgaacgcttcactctagaaatcgttgcagtcgatgctccagattcttgttcaatcgttgcataggtataaccttgcttaatcattttagcaacttgtaatcgttgagacagtgattgaatttcatttacagtacacaaatcatcgaaaaattggtaacattcttctctattttctaacgttagtattgcatcaaacaattcatctaacgctgcacctcgtaatttttcaatttgcatatcgaaacaacccctataattttattctttatgtcattttaacgcattaacctattaaagtgtagcgatttatattttattaaatctgaatcgttactttatttaattttatgctaatccagcgcgttcgaaaatagtgtcaacttgattcaaatgatgtttaggatcgaaacattcatccaattcttcttttgttaaaacacttgtaatagactcatcttgttcgattaattcacggaaaggtgttttcgtttcccaagatatcatcgcttttggttgtactttgtcgtatgcttcttcacggaccatacctttattaattaatgctaataagacacgttgtgagaaaatcagaccaaatgttttatctatgttattacgcatattatcttcaaatacagttaaacggtccacaatatttgtgaaacgattcaatgcataatctagtgctattgtaacatctggtaacataatacgctcagctgaagaatgagaaatatctctttcatgccataatggcacattctcataagctgtagtaatataaccacgaattactcttgaaatacctgtgatattttcagaaccaattggatttcgtttatgaggcattgcagatgaacctttttgaccttttgcaaatgcttcttcaacttctcttgtttcggttttttgaaggttacgaatttcaacggcaaatttttctagtgaagttgcgattaatgctaatgtcgcaatatagtatgcatgtcgatcgcgttgcaatgtttgcgttgatacaggcgctgtgccaatacctaaatgtttacacacataactttctatttcaggaggaatgttagcaaaagtacctactgcaccactcattttccctacttcaatttcttctcttacttgtttgaaacgttgtaagttacgttgcatttccgtgtaccacaatgccattttgacaccaaatgtagttggttctgcatgcactccatgtgtacgtcccatcatcaatgtatatttataattttttgctttttcagctaaaacgtcgataaatctttctaaatctttttcaataatgtcatttgcttgtttaataacgaaacttaaagctgtatctacaacatcagtagaagttaaaccataatgtacccacttacgttcttcacctagcgtttcagaaacttgtctagtaaaggctacaacatcatggcgcgtttcttgttcaatttcttgtgcacgttcgacatttacctttgcgttttgacgaattttttgtacgtcagctttcggtatatgtcctaattcactccatgcctcacatgctaaaatttccacttctaaccatgcttcatagcgattttgatcagtccaaatattagacatttcttctctagaataacgttcaatcattttttttaactcctatcgtatgtatactcgaattttcaaaaacagaacatttttaataaaaataaataaaaagttcgtttttaactctactcttcacagtttaacagaattggttataaatgtataaaaaatttccgtatattctcattctattttattttttacattaatacaattatctatggcagattaatactgatttctaattgtaaatgttcgcaacactttaatctaattggtatttataatgatccattaagaatatattattgcattttagtttttctcccctcacctagactatccacctttttattacaattaggacaatcaatagctttagtaataccagatattattcactttacttctcatattgtatagaattttcaacaatctacttttcctagtttcataatattccttcttacattccataatgtgttttaaaattattcgcttctaatataacaaattttctactcacaaaaagaattgcataggtatggcattttaaatataagcaattaatattgaactgctcgagtcgtataaatacgaaagtgattatagaaaagtactcagagattttcttaatagtaaatttttatagacagacatcaattaactacgtttctttcaaaatcgactaacatattttcatgaaacgttcgatcatattaattattgaatgagatgtttgcaatttagtaaataagctactaaattattgcataaactgataatgtctaataattaaatattttttaaacatagattaaaaatttatattgaaattcttaactaaatttaatataattattttataataaaagaaaggagtttttatatgaaaagaaactttccaaaattaatagctttaagtttaatattttctttaagtattacccctattgcaaacgctgagagcaattcaaatatcaaagcaaaagataagaggcatgtgcaagttaatgtcgaggacaagagtgttccaactgacgtacgtaatttagcgcaaaaagactatctttcttatgttacttcacttgataaaatctataataaagagaaagcctcgtatacacttggtgaaccttttaaaatttataaattcaacaaaaagagtgatggtaattattattttcctgttttgaacactgaaggtaatatcgattatatagttacaatttcaccaaaagtcactaaggattctagttcatcttctaaatacacaatcaatgtttcttcatttttatctaaagccttaaatgaatataaagatcaacaaattactattttgacaaactcaaaaggttactatgtggttactcaaaatcataaagctaaactagtactaaaaacaccacgtctagaagataaaaaggcaaaaaagaccgagagtatacctactggcaataatgtaacgcaactaaagcaaaaagcttctgtcactatgccaactagtcaatttaaaagtaataattatacttacaacgagcaatatgtaaataaacttgagaatttcaagataagagaaactcaaggtaacaatggttggtgtgcaggctatacgatgtctgcattactaaatgcgacttataatactaacaaatatcatgcagaagctgtgatgagatttttacacccaaacttacaaggacaacaattccaatttactggtttaacgccaagagagatgatttattttggacaaactcagggaagaagtccacaacttcttaatagaatgactacatataatgaagttgacaatcttactaaaaataataaaggaattgctattttaggtagtagagtagaatcaagaaatggtatgcacgcagggcatgctatggcagttgttgggaacgctaaattaaacaatggacaagaggttataattatatggaatccatgggataatggttttatgactcaagatgctaaaaacaatgttattccagtatccaatggcaaccattatcaatggtattcatctatttatggttattaaaatttgtattttagaaaggtaaataatattatggaacaatttgaattatttagtattgataaattcaaatgtaattcagaggctaagtattatcttaatattattgagggagaatggcatcctcaagatttaaatgatagccctttaaaatttattctcagtacctcagacgattctgattacatttgcaaatatataaatacagaacacaaacaactcacattatataataaaaataatagctcaattgttattgaaatatttataccaaatgataataaaatactactaacaattatgaacatagaagctttaggaacttctcctagaatgactttcattaagcataaataataagactatctagatatatttaagtaaactattactcttattaaaggactctaggaagaaaaaatttcatgcaatgagatttttttagaaaaagcgacgatatatataatttaacaatgattttaaaatattaagaacccccagcatatactttatatagcttgctgggggtttctcatacaatatggatcgagcatcttgcatgtataaacacataggctattcaaagtaaaattactcaaactttgaatagcctttcctcctcaaatagtctttatttaaattggattatgttattggattttcttacctacaaaaatgatttcttgatgtgatacttcaaccgtgccatctttttgctcctgaaacacgggtttttcaatacgttttaccggcatatacccttgcattttcattcgtgacaaacaatctgcaattgtttcgttctcatttactttgaatttcatgttctactacactttccagttcttctggttcatagtctttaagctttctacgacgaatgcctttagtccagaatccaccatgtatgtttcgaggttcatacgcaatgataaatgctttcggatctaaattttttatcgtatccatcaatttacgttcatattttcttggtgttaaaatttgcatcaccatacgactaccatctctaccaaatgcagcatagtgcgtaacgccatatcctaaatttcgaagttcattcggtaaatctaactcatattctgctgaagttacatttacaactgtataacctaatgccagtttttcttctattttcataccaacaatgatacctattgaaaaaccaaatgcgtaggcaataatattttgaatatggtctaaattagacataaccaaacctaaaccaacgatataaactaatacttctaaaaaactaactgatgcagcaatataacgataacctttcaacgttaaaattgttcgcatcgttaaaaacgttacataacaaacgttaatgataaatatagttagtaccattaaccatggattttctgttacgaatgacataaggcgccccactctctttcaattacactttaaatatcaaactgcttcaaactaaccttaataaatgcatattaatataatatagtacgaaaactctcataaataaatagcgaatttgtcataaataaaatttattctcaaatgaacatacttactttatttcatacattatcaatttatatactgaagtagcctagttgaatgtggtttaacgttattaattctaactcatatttaatttaaggcacacgttagaagaaaaaattaaattaggattttggccacgtgtatcttgtatatgcaagttcacgtttgtgtgcattccgtatataatgattttcaattactttttgttcttctggcgtaactggcttaccttctaaataattatcaatcgcctcataagttacacctaatgcatcttcatctggaagctgtggtttgtcatcttctaaatcagcagttggtgttttttcatacaattgttttggtgcaccaagataagctaataactgacgaccttggcgcttattcaaaccgaatataggtgcaatatctgcagcaccatcaccatatttcgtataaaaaccagttatattttcagctgaatgatctgttcctactacaataccttgtcggtttgaagcaattgaaaattgtactttcatacgttcgcgagccttttcattacctttttggaagtctgttaggacaatcccagcttctttcaatgattgcacactttgatcaactgcaggcttaatattgactgttactatttcatctggctcaatgaattgtaaagcttgctcaacttcatcagcatctttttgaactccataaggtaatttaactgcaataaacgtacaatcaatgccttcttcacgtaattcgttaacagacatttgcactaattttccaactaatgtagaatcttgtcctcctgaaatacctaacactaaagattttataaatgaatgtgattggacataactttttataaattgttttaactcagcaatttcttccgcactgtcgatacgctttttcactttcatttcttgtacaataacgtcttgtaatttactcattatcttcttccatctccttaacatgttccgccacttcgaaaatacgtttatgtttattatcccaacatgctttacttaaatcgactgggtactcttgtggatttaagaaacgcttgttttcatcccaaatggattgtaatccttgtgctaaataatcacgtgattcatcttctgttggaatttgatacactaatttaccattttcataaatattatgatgcaaatcaatggcttcgaaagattttataaatttcattttataagtatacactggatggaataattttaaaggttgttcatcgtatggattttcattttccaaagtaatataatcgccttctgccttacctgttttcttgtttataatgcgatatacatttttcttacctggcgtagtaaccttttcagcgttatttgataatttaatacgatcactatatgaaccatcttcattttcaatagctacaagtttatatactgcacctaatgctggttgatcgtatcctgtaatcagctttgtaccaacgccccaagaatctacttttgcaccttgtgctttcaaactcgtaatcgtttcttcatccaaatcattagacgcgataattttagtttcagtaaatcctgcttcatcaagcatacgtctggcctctttagataaataagcgatatctccagaatccaatcgaatacctacaaagttaattttgtcacctaattcttttgcaacttttattgcatttggcacgccagattttaaagtatggaatgtatctactaggaacacacaatttttatgtctttcagcatattttttgaaggcaacatattcatctccataagtttggacaaatgcgtgtgcatgtgtaccagacacaggtataccaaataatttacccgccctaacattacttgtagaatcaaagcccccgatgtaagcagctctagcgccccacaatgctgcatcaatttcttgcgcacgacgtgtaccaaactccattaatttatcatttgatgcaatttgacgaattctactagcctttgttgtaattagtgtatggaaatttacaatgtttaataaaattgtttctattaattgcgcttgaatcaatggtgcttctacgcgtaacaatggttcgttaccaaagcataattcgccttcttgcatcgaacggatgctgccagtgaattttaaatcttttaaatatgataagaaatcatccttgtagccaatagactttaaatattccaaatcagattctgaaaatccaaaatgttctataaaatcaatgacgcgttttaaaccattaaaaacagcatagccactattaaatggcatttttctaaaatataaatcaaatacagccattttttcatgaatattatcattccaataactttcagccatatttatttgatataagtcattatgtaacattaaactgtcgtcttctaattggtacactcgtatctctccaatcgacctaaatattttcttacattttatcataattcatttttttatatacataagagccccttaatttccatacttttaattaaaatcaaccaacaatttaatgacatatacataatttttaagagtattttaataatgtagactataatataaagcgaggtgttgttaatgttatttaaagaggctcaagctttcatagaaaacatgtataaagagtgtcattatgaaacgcaaattatcaataaacgtttacatgacattgaactagaaataaaagaaactgggacatatacacatacagaagaagaacttatttatggtgctaaaatggcttggcgtaattcaaatcgttgcattggtcgtttattttgggattcgttaaatgtcattgatgcaagagatgttactgacgaagcatcgttcttatcatcaattaattatcatattgcacaggctactaatgaaggtaaattaaagccgtatattactatatatgctccaaaggatggacctaaaattttcaacaatcaattaattcgctatgctggctatgacaattgtggtgatcctgctgaaaaagaagttacacgcttagcaaatcacttaggttggaaaggaaaaggtactaattttgacgtgttaccactgatttaccaattacctaatgagtcagttaaatattacgaatatcctacgtcattaattaaagaagtacctattgaacatgatcattatccaaaattaagaaaattgaacttaaaatggtatgcagtccctatcatttccaatatggacttaaaaatcggtggcattgtgtatccaactgccccctttaacggttggtatatggtaactgaaattggcgtacgtaactttattgatgattaccgttacaatttactagaaaaagttgcagatgcgtttgaatttgatacacttaaaaataattcatttaataaagatcgagcacttgttgaattgaactatgctgtgtatcattcctttaaaaaagaaggcgtatcaattgtcgatcatttgaccgctgcaaagcaattcgaactattcgaacgtaatgaagcacaacaaggtcgtcaagttaccggaaaatggtcttggctagcaccgccattatctccaacattgacgtcaaattatcatcacggatatgacaatacagtaaaagatccaaactttttctataaaaagaaaaaatcaaatgctaaccagtgccctttccatcattaagttagtagaggtatagcatatgcaattatattatttaggccctaaaggtacattttcatatttggcttgtcgtcagtatttttctgaaaatgaagcaacttttcaaccaaagtcaaatttatttgaagtcatcaagtcagttgcagatgatgacacatcgattggtgttgtccctattgaaaattctatagaaggaacaatcaacattgtggcagatgcacttgcacagcaagatgtctttgcacacggtgaaatacgtttagatattaactttgcattatatggtaatggttcgaacaccatttctgatattaaaaaagtgtattctattgcaccagcaatcagtcaaacaacaaattacatacatcaacatcaatttgactatgattatgtcgacagtacaattcaaagtttgactaaaattgaaaatggcgttgcagcaattgcacctttaggtagtggtgaagcttatggttttacacctattgatacacatattgaagactatccacataacgtgacacgttttttagttataaaaaatcagcagcaatttgatcaaaatgcgacatcattgatgtttttaattacaccaatgcatgataaacctgggttgttagcaagtgtgcttaatacatttgctttgtttaatattaatttatcctggattgagtctcgtcctttaaaaacacaattaggtatgtatcgatttttcgttcaggctgattctgcaattacaaccgatataaagaaagtcattgctattttagaaaccttagatttcaaagtagaaatgattggtgcttttaattaaactttattttctaggttctacaatttaaataaaataaagagtcaaccaaggattaaaataggaatccatccttggttgactttcttttgtttgtattgtttttacacgatgctacggtatacgtttcgttaccactcgttcaagcaattgctaatgtaacattttatttttcgttctaatctgcaattactatttcaatggcagtggttgatttatatcaatacctaaaactataggcattatataatacacgactaaaataataattattgcactgattaagtttacccagaatcctactgatgccatttgtttgatagatattttacctgaaccaaagataattgcatttggtggtgtccctactggtaacatgtatgcacagttagccgccatagctgcaggtgccataagtagtaatggatgcactccaacagcaacagataacgttgctaaaatcggtaaaatcatcgttgcagttgcggtattagatgtcacttcagttaaaaataggacaaagatagttatgacgattacaataagaatcgggctgacaccatttaatgatttcaactgttcgcctaaccattttgctaaaccactttcagaaatacctttcgctaatgctaaaccgccaccaaataaaattaatacaccccaagggagctcttttgcaacttcccagtcaatgatacggcgatgtttttcagtatttttagctggaataataaataataatattgatataaaaatagcaatcgtaccatctgcaacggatgacgtaacttcccattttttcagaagaaactctcttgtaatccataataagctggcaagtacaaagatagtttgtactaccttttcttcatacttcattttgccaagctcgtctaacttttgtttaattaacgtctgaccaccaggtaaatatttcaaatcatgtctaaacgcaacatatcttaaatagagccaagtaatacctaacaatacaatgaccgttggaatccctacaatcatccatttagcaaaactaatttcatgtccaaaatgttgcatgtattgtccttttaaaataattagcggcggcgttccgataagtgtacctaatccgccaatcgtacctgcatagccaattgctaaaactagagatttttcaaacttttgaatacttgtttgattcgtattggcttcttgtaaatcatgtgcttccttaataattgctaaaccaatcggaatcatgatcattacagctgcagtgttcgatacaaacatagataagaatcctgttgccaccatgaatccaagtaatatttttgaagtgcttgcaccaattaaattaataattgtcaacgctactctcgtatgtaaattccatctttccattgcaattgccaaaataaatccacctaaaaacaaaaagataatatcattgccatattcggatgatacttgttctggtgtaagtatgtgacctaatggtaataacacaattggtaataagctcgttgctgcaataggaattgcttcagtaatccaccaagtcgcaatccataaagtaatcgctaagacatagacgcctttccaaggtaagtcttgtggatgaaagaacaataatgttaataggaaaagtaatggacctaatattagtccaataagttgtcccgtactaaacggtttctttttctttgattttgaaaagaatgttaaataccttttcgatatcattgattgatgttgattgaaataagccataaatttccccctcatgatgattatgacaagctacttcaactcactatattagagtatagaaagttgtctatcttgtattatcattaccgtcaaaataccccttttatcagataattgggtttattatagcatatttataccgttttatgaatgcgctttcaaaaattatccagtaatcttaatcctaatgtcatgcgaaactttttacttttttatttcatctacattgattgtagtaacttgaatacccgcttcaacaggacttaaaaacactgtatcaatatcttccaaatgaattgattgagtcgaattattgaatgtattcccaacgattaatacatctttatgtttaacattattataattacgtacatgtatcgcatctttagacattgaccctttaaattcatttccaattatattcatatttattcctgcttgggaacctaagtcttttcctgtcatcacatctgcagcatttttaccatctctaactcctaaatatctaataccaccctcacagttaataaacttattattaataatgaaagcatctttatacttcaagggagttaatgcataaccttgtatatcttcaaatatattatttctaatattaatattctcatagtaacgattatgtctacttgcatgtgagccaatagcacgattccaacttcccatttcgggcaattctgaaggtccaaaataacaatcttcgataatgacatttttcgttatcgtaccatctgtcgttccgaattttggaaaagcaccaggtacttgaatgtctaattgtattgcttcagaataaaaacgttcgccactatagtctacgaatccttcaaatgaacagtttttaatatagagtccattaatcccacaagcatcaattgcatgaccactcactacattcttaatggttacacctattaattgaatatcttcagcatgtccaatgcacatagctgtattattataaggatacgatacgccattcatatcaaacttgccgcctttaatatgaatatgactgtgtccattataaccacgataaaaaccaaagcgatgaccattttttaataacggaccagaatgacatcgacgtaaaatagtttcattatccaacaaaagtgttgtattgccatatatcgttaatggtttgcaaatatcatacgtccctttcggtatataaactgtcgttggtttacatcttccatgatttaacgcacgttgtattgctcgagtatctttagttttgtttatgcctgttaacccataatctttcatattgatatacataaatcgtcatcctttgtctattttctaattacttcatatattaaccaattattcaaattataatcgtgttaggttgatttagcagatagtcataaatctcgtgatgccatctattagcatttttatattgaaaacatcaacacttgatattagttctaagtttgtcacatttagtattctattacagctattttaaagctatcgtaaaaacatcttataatatttgttgattgcgtgatttgctcttccaaaaaagttgattaatctatatacttaatctatatttatatattaaccattagggttaaaaaatactctagcatttatgaatagatgggagtttattttattattatataggagagatgttgaatgacacatcgcgcactattagttgttgactattcatatgactttatcgcagacgacggcttactaacatgcggtaaacctggacaaaatattgaagattttattgtttctcgtatcaatgactttaattattatcaagaccatatattctttttaatggatttacattatttacatgacattcatcatcctgaaagtaaattattcccaccacacaatatcgtagatacaagtggtagagaattatacggtaaagtaggtaaattatacgaaacaattaaagcgcaacctaatgtacatttcattgataaaacgcgctatgattcgttctttggtaccccgcttgatagtttattgagagaaagaagtattaatcaagtcgaaatcgttggtgtatgtaccgacatttgcgtgttacatacagcaatttctgcatacaacttaggctataaaatttcagtacctgctgagggagtggcttcatttaatcaaaaagggcatgaatgggcacttgcacatttcaaaaactcattaggtgcagaggtagaacaacacgtttaaatcgtgctaaaataattataaagaatacaatatacaagggagatatttgacaatggctaaaacatatattttcggacataagaatccagacactgatgcaatttcatctgcgattattatggcagaatttgaacaacttagaggtaattcaggagccaaagcataccgtttaggtgatgtgagtgcagaaactcaattcgcgttagatacatttaatgtacctgctccggaattattaacggatgatttagatggccaagatgttatcttagttgatcataacgaattccaacaaagttcagatacgattgcctctgctacaattaagcatgtaattgatcatcacagaattgcaaatttcgaaactgctggtcctttatgttatcgtgctgaaccagttggttgtacagctacaattttatacaaaatgtttagagaacgtggctttgaaattaaacctgaaattgctggtttaatgttatcagcaattatttcagatagcttacttttcaaatcaccaacatgtacacaacaagatgttaaagcagctgaagaattaaaagatattgctaaagttgatattcaaaagtacggcttagatatgttaaaagcaggtgcttcaacaactgataaatcagttgaattcttattaaacatggatgctaaatcatttactatgggtgactatgtgactcgtattgcacaagttaatgctgttgaccttgacgaagtgttaaatcgtaaagaagatttagaaaaagaaatgttagctgtaagtgcacaagaaaaatatgacttatttgtacttgttgttactgacatcattaatagtgattctaaaattttagttgtaggtgctgaaaaagataaagttggcgaagcattcaatgttcaattagaagatgacatggccttcttatctggtgttgtttctcgaaaaaaacaaatcgtacctcaaatcactgaagcattaacaaaataatactatattactgtctaattatagacatgttgtatttaactaacagttcattaaagtagaatttatttcactttcaatgaactgtttttttttttacgtttgactaatttacaaccttttcaatagcagttttcattcctttagctatcctaatccacagattagtgatttctatacaattccccttttgcctttacattttcttgaaatatttgcgatgttgagtataaatttttgttttcttcctacctttttcgttatgattaaagttataaatattattatgtacacgattcatcgctctattttcaactttcaacatatataattcgaaagaccatttaaaattaacggccacaacattcaaatcaattaatcactttttccaaaataatcatataaggaggttcttttcattatgaatatcattgagcaaaaattttatgacagtaaagcttttttcaatacacaacaaactaaagatattagttttagaaaagagcaattaaagaagttaagcaaagctattaaatcatacgagagcgatattttagaagcactatatacagatttaggaaaaaataaagtcgaagcttacgctactgaaattggcataactttgaaaagtatcaaaaatgcccgtaaggaacttaaaaactggactaaaaccaaaaatgtagacacacctttatatttatttccaacaaaaagctatatcaaaaaagaaccttatggaacagttttgatcattgcaccatttaactatccttttcaactagtgttcgaacctttaatcggtgctattgcagcaggtaatacagcaattattaaaccatctgagttgacaccaaatgttgcacgagtgattaaacgattaatcaatgaaacatttgatgcaaattacattgaagttattgaaggaggaattgaagaaacgcaaacgttaattcacttaccttttgactatgtcttctttacaggaagtgaaaatgtaggcaaaatcgtttatcaagctgccagcgaaaatttagttcctgtgacattagaaatgggcggtaaatctccagtcatcgttgatgaaacagcgaatattaaagttgccagtgagcgcatttgttttgggaaattcaccaatgccggccaaacatgtgttgcaccagattacattttagtacacgaatctgtaaaagatgatttaatcacagccctatcaaaaacgttgcgtgaattttatggtcaaaatatacaacaaagtccagattatggccgcattgtaaaccttaaacattatcatcgtctgacgtcattacttaacagtgcacaaatgaatattgtatttggtggtcatagtgatgaggatgaacgttatatagaaccaacattgttagatcacgttacaaatgattcagcaattatgcaagaagaaatttttggtcctatcttaccgattttaacgtatcagtcattggatgaagcaatagcctttattcaccaaagaccaaaacctttgagtttatatttatttagcgaagatgaaaatgctacgcagcgtgtaataaacgagttatcatttggcggcggcgctattaatgatacattgatgcacctagcgaatcctaaattaccatttggtggtgttggcgcctcaggtatgggacgctatcatggtaaatattcatttgacacttttacacatgaaaaaagctacattttcaaatctacacgattagaatcaggtgtccatttaccaccatataaaggtaaatttaaatacatcaaagctttctttaaaaattaatttttgagacaaaaataaaccatgcttccataatttgatgttcttgaaaacaataaatttcaaggtatacacaaattttttggaaacatggttttctttttatcatgattaattaaagattaaaatatgacacatacaccttcagatgctacacgagtgttatcacatagcgtaattttacctgtttctttatttctttcgaaaacagttacaactgaatctccttgctcatgagcacaaactaaaaggtcatctgatgaggcaatattaaaatctcttgggaattgaccaccactttcagtaattgttactagttctaagtgttgaccattatcaagaactttaaaaattgcaatgctatcatgccctctattagatacatataagaattgttgatcatgagacaaacgcactgctgcaagtttagtatctccatcaaagttttcaggaattgttaaatgacgctcgagctcttcaaatttaccgtcattatattctgcaacactcacagtattggataattcgtgtacgacataagcaaattttccattatcatgaaattcaatatgtcttgtcccatcactatctttaaataaagattctttataaaattcaaacccgttgtcatcaaatttataagtaacgatacgatcagcacctaaatctgttactgcaacgtacttaccatctggagtttgattaatataatgtgcgtgtggatgatcttgtctttcatgtgtacctgttggaaaatcatgcgcaagttcttgaattagacgtataatttcacctgtgtgcgtgtttaattcatacatacgtatgatgccagctccatataccgcttcaaataaatatcgtttatcttctgaaatcgatacataacaacctgtaccagcttttgaagacaaacatttatttaataaatgcaattcaccattgtcatcaattttcaaactcgcaacaccgcattgttctccttctttgttgattccatataaaacttcgttattacgcaccaaatatgtagacgcttctaattcaaatcctgtttctaataaatcaatacgtgactgattttcgtttaattcaaaacgataaatccctttaccattctttttagtgtaagaaccaatatatccatttgtcattacttttacccctccatgttagtcttattttcattttattaaattttagctagaattaacaatcatttatcatttccttaaagctaaaactgtttaactactttaaaagaactatttgctggtgatgtgtcattattcgattttaattaatccctcttttttacttacccgagcattaattattaacgcgtttatgcttccacaaaatttttgttgcaaaatagaacacatgttcgtataatgtaattatcagattggggtgaattaaggatgacaagttatgaagaagaaactgattatcgtaacgttccaagagaattactagataacaatatacctatgggaagaggcatgattaaatgggctccttttgcaacattacccgaacaattcgaaacgattcaacaatacattatcgaccaaaacaaaattacacgtcctgtattatcagatgatcaattggctgagctaaacattcggctacacgaggcgctacaatatgcccaacctgtagaagttaaattttataataatggctttgtagattcagtacgcttaaccatttatcgtattgatgctattaattatgaaattgatggttatgtttacaatcagcaacaacgtcaaaaaatttctatctttgatatcttagatattgtcttgttaccttaatgctttgaacataattaaaggcaagaacaatcaatattgtccttgcctaaatgttattagttatttttactttcgatatcagaaataatttctttagtttttctttcaatatcttcaaaatcttttttaaagatataagcaaatgctactacaccaacaccagcaactaatgttgtaatagcaactaagctaaatacgaatttaaacacacatttaataaaattccacatctcaatttcacctctgttaaattaaatacctatctacatttcattatactatcatatatagaataatcattaaataaatacccacttttacgaaatatattcatcaaattatatagcgagcaagctaatgattattttcaaaaatgccgaggaacctctgtttcaacgtgacatgaccttatatgctaatgttaacaatgactattatcgtgaatgctaacttaagattgttatttatgataagatgattttaagtttttaacttaatatccccaccatctataaaaatatgttttaacagattgataagtcttatacaccgagaaatcacctcaaacaattttatatttcatttagtaaaatataactttatttaacatgacattcaatatacatacgattactatttatttacaatatattacaactaaaaagaaaggggccgatgatatgcaacaagtgacatcagatattatgacttttagaggttcacatttcgagttaggtgttaaaactggtaaatggcttcaacaaacacctcttctaaaaaatagagaaaaagaatggaaaaaacgtgtcccacgtttcgatatagatgtaaatgaaacttatcaaatattccaaacttacgcacctcaaatatgggaagaattaatgggactacaaagtatactcaaaatgccaacacgtcaaattattttaaactttggacattatcgttttaccgatttaaaagaaagtggttgcactgtctttcaaggcaaagacttcatggttagaaattacgattaccaccctgcaacttatgatggacgctacttactatatcaacctacagatagcggtttagctcaaattggtcctgtatcaagggtaactggaagaatggatggtatgaatgagtcaggattaactatgggctataactttatgcaccggaagaaaccagcaaatggttttgtatgttatatgattggtcgtctaattcttgaaaattgccgaaatgtaacagaagcaatccaattattgaaagaaataccacacagaagctcatttagctacatactgatggacaaatcattgaaccatgcaattgttgaagtgacgccgagatcaatagatgttcgttatgataatatatgtacaaatcattttgaaatattaacacatgaaaatcgcaattatacaaaagaatctaaagaaagactagcgcgtaccatttcacaaactaatgataatttagatatgactacagcatttaagttattcaacaatcctcagtatgaaatttacagtaaactattcaaaagctggtctggcaccatccatacatcaatgtatcaccctgaaacattaactgcatattttacattgggagaaaatgcgccaccagaaataatagatttcaaatcatggttagatggtcaagaccttaatatcactcactttactggcaatatagataccgacttaacttttgccaacaaataaataacaccgatattagagaaattatgcttcctaatatcggtgcttacatcctttatttattcaactttgatattaccatcaatcgtataaaattctaaaacactatcgcttttcccaactttaccattaataaacgttttatttttaactacgctatcacccgttcccggatttagcttcagtatagtatcttcaggtttactatcatacttaaaacgaatatctccttgtttagtagaagcttttgcatctacttttgatggcatgtttttaaattcaatgtcaccatgatcgtttaaaaatatggattgtttaatttgactcttgtcgatttgtagcataccaataacaactttaatattactatttttaatgttacttttactaatataagtaggactattatttgtctttgaatctagtgcgtcaagatttgagtttttaataactacttcaccgttaatgctttgaatacttgtgttctctaaatcaacatcactgattctaacacttcctgctccagacgatatatttaaacgtttaatcattttatcaggcatttcaatcgttaacgttttcttattctcatgaaaaggattcatatcaattgcatatcctcttgtcttagaccttttatcactaatcttcaacgtcttatctactatattaattaatatatcattgtcaccatcatatttaactctaaattgattcccccgctttatacgaagttctgtactatccaaatttatagatacattgtcaaaagcatcgtctttgaatgttttatcatattgtttagtaccatatttgtttttatcatagctgaaccaaataatggttgctgctgtaaaaaagacaacaaacactaaaagcccaataaaaaagaatttcttcattttctaacgcttcctttgacagttttaatataccaaagtaaatattttaagattaaacgataaatgtattctaaaatcttaaatatgacaatgataaatactaatcctaatcctgaatatgatatggcaaaaaatacattactaattgagtctacaattcctctggatattgctgatgctaataaaataattggacaaaacagcagcaaaagtgatattaaaaataatgctaatacaaataatccaactatagatactggtataaggatgacaaaaatagatagaatgcctaaacttaatgaagcagcaacagctcttgaaatattttcaaaagttggtttagattcagcataatcaataacacttctagcttttgtttcagctgcaacatcttgtgggtcttttaacttctttaaaatttcctcttcatcaacgccattaagttcttgctcataaaaataacgttcatattcatacattttttgatctcttaaatgcctaggtagcgcatcaagtgctgtttctaattcatttaaataagtaatcttgttcatataggtcactcatcccaataaaattattcattcgttttttataactttaagacctaaagctatttactaaaaaattcaatacgtttaatttctaaatcttgataaagtaaggttaattttaaatggttatctctatcaatatactttaccgatgagaaatcattgccaacttttgttcttttatatccgaatccaagattttcaatcgcgttatttatcggcgaaccaattcctccatcaaaattagtatgtatcttttcatctcttactaatattatccccttaacgatgttatccttttctctcactttaacggtaaggtcagggtgagctttactgttataaaatttaaaacgatcaaacttaatttttttatttacttcatagccttttttatcaaacttctcatttaatttaatatcgtttatttcaagattagacaaatccacagttttcgtatgacgatattgatataaaccaattaatacaccaaaagaacagattaaaaataatataaacacaacccagcgattttgaatacgcactgatgtcaccctttctttgtacttatttaaatatagcataaggtgcttcccgtttcatccttaacaaaaattaacaaagaatttgcaattaatttatttcattaccttttattactataaattggtataatgttgtaaatgctaaaggaggtttttacaatgacaaatttagaaacttatttcaaaaatagccaacccttaaatgaatacattgatggaatgaagacaaatcaagataccgttctcagtatctatcaatcatttgagttaccagaagatgattcacgcatcaaaaaaataaaagagatgaattattctaaagtattagtaattactgaagactggtgtggagatgcaatgatgaatctcccaattctaaaacacatcagtgaagcattaaatttagaagtgcgcgtgttccatagagatgatgatacaaaactgatcgatcaatatttaacaaatggtaaatcacgtgcaattcctatcttcgtattcttgaatgatcaattcgaacaagaaacagtttggggaccaagagcaaatgaagtccaaaaatttgtaactgatgttcgtgccgataaattaccgagcaaagatcatccagactatgcagatttagaaaaagaaacacacttagttatatcaaatcgctataaaactgacgcttcattttggaaagcagtttataattccatcctaaacaaattagaaaataaataaatttacaataagacaaactttgaggttgggaaaatttaaaattcccaacctcaaaattttttattaaatgtcttttttagcgacatataagatattcaaaatgaagaatatcactatagaacctaatgaaattacccattgccaattgctaaaatcaaagttagagctaatcattttatcagttaagtaagcaaaagggatataatcaaaagcatctaaaactttatcaccatatcttggaataaatgtaatgaatggtttaataaacggtacaataagtactaaaaatacacctaatgaaaatatcattgctgttttttgtgatgcaagtgtgattaagaataaaaacaagccaaagaatagtaaaaagattaggaagaaccataaattatctacatatttagaaaacgccaaatttttcccattactagatgcctgcacaacaatcaaaatcacataatgaattaatgcaaataatattgaaattaaaataattgaaattgttttcgaaataatgtatccaacacgtgttttaactttactcatatatagttggattgtaccttgtgaaaaatcacgcgtaattgtcttaacaacaaacattaatccaattattaacaataaccattttgctgcagcaaatacagatccatagacaataatatgtttcgggttatccatcgaatttgccataagtatactttgcgttgcaatcaaactagatacgactagtatcgctaaatatgttaaaggacttttaaaaatactataaaaatcatacttaactaaatttaaaattctcattatttatcacctctttgatttatattgaagtacgtatcacgcaatgaacttttacgtgtttcaatatatttcggataaatatctaattcagataatgcttttagtataacttgataatttttttgtgcattgatcattaaatgtccatctgctttgtcgacattttgtaattggaaatgctctgcaagatatttttcagttctatcaaagtctttatgatcaacagtaactatcgttgtgtcagatgcaacaccttcctccatgtttacatcttgaacaaaatgtccgtctctcaaaaatacagctctatcacaaattaattcaatatcttctaacttatgacttgatattagaattctcatatcaagttcatttactagagacttaattgtagtcagcacatcaattgagccatctggatccataccatttgtaggctcatccaagattaaaaatttaggtttattcattaaagatactgcaattgctaacttttgcttcatccccattgaatatttcttaactttctttttaatataaggtctcataccaaatgcatctataattttgtctgtgtatgctttatcaaaacccttacctaatacttgtgcaaataatttcaagttatacaatcctgatttattatcatataatttaggatgctcaattaaaaaaccgatattatctgcattatcaatatctacttttccatcaaatttaataatattaccattcattactttcataacggttgttttaccaacaccgtttttccctattaatccaacaattctactatcgccaaagtcaaaatcaatatcatttaaaacgacatttgagccgtatttttttgtaatatgttctaatttcatcgactgcctcctttaaattttctagtatttattttattaagctgtttaaaataattaacaataagtataacaatgcttataattagaaaaccaatatttaaaatatatgaatatagatctgggaatgatgattgacttagaacaaaataattcaccaacactattgcaattgaaaataaaaatggaactaaaatgataatagtaaacacgtatataccatagggcactttgactctgcgcaattctgtaaattgactaaatgcaattggtatagacaagaagttagatatgacaaatgcatatgcagttgaaaaataaattgaatttggttcaatcacatctgcttcataagcatataaactaataacaagcgttccaactaatgttaaaacaatgcatgtaatatagttcgcattaagcaattgtttttttgacacaggtaaactcatataaaaataatatgaatcattaccacctaatctacgattgagtctaaataagtgaccagcatctaaaatccaaataatcaatattgttggacttataaaagattgcaataggtaaaagaactttgttgagtcaagcattatataaaaaggatataaggttaataatagaacatagatgataagtgtatatcgtcgtaatttaaaattcctaattaacaatgccttcatttaaaaaccttcttccatcaatttgatgttttcatgatatttaggttttctcttttcaagataaaccattaagttttcaatagaaggtgtagtgatattcactttatgacctaaaatttctttaaatacttgcgcatgttctgttaatcctataaatcctgtacgcttatgttcttcaaaaataagtagagatgctaattcatcatcaaggtcctcaattgcaccactcacaacttgatatctttgtaacagttgttcttttgaaccatttaagataacttcaccgtcacttaagtgaatgatataatcagctattttttctaaatctgagataatgtgtgtcgacatgaatattgttttattttcatcaattaattcttgctgaattatctccaatagttcatttctagctaagggatcaagacctgaagtaggctcatcaaaaatatacaattcagcatgatgtgaaaatgcaactgctaatgataatttcattttcatgccagtcgaaaatgtttttattgatttattgattggtaaatcgaacttttcaagataaaattcaaatacttgatggtcccatttacgataaaaaggggcaatcattttttcaagttgcttcgtagtccatctctcattaaaataattttcagcgtaaacaaacccaattctattctttaactctatcggattgagagccatatcctcttctaatactctaataacaccagtttgtggttgatacaaatccataattaaccttattattgtggttttaccagcgccatttctaccaataaaaccagtgacgaatccttgaggaactttgaaagagatattctttaaattaaactgatcacttgaataattaacattacttacttctatggcattcatgatgattcctcctcataaatgaacgttaaaatatcttgaagttcctcaagtgacatttcgatggcttgcgcttcattaaccaattctttaaccaaattttcaatggtaaaaaattgtttctcttttaaaatagaactatcttgctccttaacaaaggtcccttttcctctaattgtggtaacaaacccatctttctctaaatcttcataagcacgtttggtagtaattaaacttacttgaagatctttggcaagttccctcattgatggcaaatgctctccaggagcaacatgtccctttaaaatattttgttttacttgttgcttaatctgttcataaatcggaaaatcactattgttttttaaaattattttcatcaacgtccccctatcaccttctgtatatatacaatatacacaatatacacagttttgtaaatatgcatgtttcattatcaaccagtcttcagaaataacactgggtattgtattactagcagttgaataaaatgaaatgactctaccatttaatcttgcattgtctacttcaataaaaaagactgtcaaaacgaatattcttatactttgacggtgattgtcgcgtcattaagaacagtcgtttaaaacagtcaattctatttgttatttttacgtcgatcattacttctacttataaaagcacaaatcataaacataattgctgccaataatagttttataccttggctctcatggtttgttgcttgtaaataataaccaacaataaataaaataattgctaatgctacaaatatttttgttagatgtttcaatttatttcacctcaacatcgacattataacaaatataaagatttatcataacttaatatattgtatagtgtaatataaccaatctctcattggcttacatgacaacaaaactatgcattcaaaatgattattgattgcgatatattgtgttcaatgatattatttaagtgtatccacagaattatactacacaaccccaagtctggtaccagcagacttggggttatttatgtgtgtaggatcattttttatttttccatttcagttctaaccaaagccgaaaaataattagtaagccacctgtaataagtgtcatcatcccttcttgccaccacatcattacactacacctccgttcgactaaagtatcatactgaaggatgacctacacctattctaacacaaaaacagaacatgtgttcgtattttggtagcggattttacatattattcgttaattcaccaacaacactttatctttggtataattgaagataatatataggcatacaatttttttaaagagaggttaagcaattatgaatcctttagcccaaagcttaaatgaacaacttcaacagtcaaatgcaactgcctttgcaatgttatctgacttaggtcaaaatatgttttatccaaagggcattttatctcaatctgctgaagcaaagagtacaacatataatgcaactataggtatggcgacaaataaagacggaaaaatgtttgcatcatctttagatgcaatgtttaatgatttaactccagatgaaatattcccttatgcgccaccacaaggcatcgaagaattacgtgatttatggcaacaaaaaatgttgcgtgacaatccagagctatcaatcgacaacatgtcacgaccaattgttacgaatgcattaacacatggtttatctctagttggcgatttatttgtaaatcaagatgacactatcttgttaccagagcataattggggtaattacaaacttgttttcaatacaagaaatggtgcaaaccttcaaacatatcctatctttgataaagacgggcattatactactgattcactagtagaagctttacaatcatacaataaagataaagtcattatgattttaaattatcctaataatccgacaggttacacacctacgcataaagaagtgactacgatcgtcgaagcaattaaagcattagctaataaaggtacaaaagttatagctgttgtggatgatgcatactatggtttattctatgaagatgtgtatactcaatcattatttactgcattaactaatttacattcaaatgcaatattacctattcgtttagatggggcaacaaaagaatttttcgcatggggattccgtgttggatttatgacatttggaacgtctgatcaaacaactaaagaagttttagaagccaaagtaaaaggtcttatacgaagcaacatttctagtggaccgcttccaacacaaagcgctgttaagcatgtattaaaaaataataaacaattcgataaagaaatcgaacaaaatattcaaacattaaaagaacgctatgaagtcactaaggaagttgtctatgctgatcaatatcattcacattggcaagcatatgactttaactctggatactttatggcaataaaagttcatgatgttgaccctgaagcattgcgcaagcatttaattgacaagtattctattggtgtcattgcacttaatgctacagatattcgtattgcgtttagttgtgtagaaaaagacgatatcccacatgtatttgattcaattgctaaagcaattgatgacttaagataattaacttcaaccaataatccgatgtgtatgactcggattattggttttttatttttaaaattattccttctttcaaagcatcataagatatattttattcagcaacttattaatcgctatacctaattagttttatacatctctcctaacaaaacttgatacaccttagataaatttatcaaacgtgtggcaaatcacttcaagtatcacatctctacaaatgtaaaaggcaccccactattgtgagatgccttaatctaaaattaaagattaaaatttaatttcaatgtctacttttttaatgtcagttgctttaaatacttttgaatcttgtttcgcagcttttaagtcaacaaattttgatgatccgtctttaaaatacactttatacacagtgcgttcagaaagtccaatatcatgtttagtaataccttgatcgcttgctaacgctagtctaagtttagcattcaagtcgtttgttgttattttatgtggatgtaaaaacgcaaattcatttgaaactacatttgaaaatccatttatcgttactggaaacttcactttagtcgctatgttagccactttattaagcgctttattagatttagtgtgttgttttacatcaatatctatctttttaatatctttgacactgaataagtttcttgtaaagatatctgatttaaggtcaactacttgtgtctttccatttttaaagtgtacagtatactttgcttgtttcgcaaatttcaattcaatatcattgatacctctatcatgttttaaaactgatttaacttttttatttaaatcttgataaccaattaattgtttattcgaaagttttagttttgatgcaataggtgttgatgtcccatttactgcgattgtgtatggtacatagctatccgctttcgcttttgaccctgttttaacatcgacatctatctttttaatatctttgacaaaaagcaaattcagttggctaatttttgagtttaaattaatcactttttttgttccatttttaaaatgtactgtataagttgcttttttagcatattttaattcacgttcaccgatacctctatcatacttcaatactgatttaacttttttagtgatatcactgtaacttacacgtgagtcacctttaaattttaaatcagataaatttggtgttgatgtcccatttactgcaattgtgtatggtacataacgctctgcattcgcttttgatccagttttaactgtaacttcaattttcttaatatctttcgcatgaactaaattagctgtataaatattcgagtttaaatgtatcactcttttaccaccatttttaaagtaaacagtgtaatacgctttctttgcgtgtttcaaatcacgttcactaacgcctctgtcagatttcaatactgatttaacctttgctgttaaatttttgtaatttgtccaaggtttatttgaaaatgctaaattagattgaatattagttgttgtaccatttaaattaattgaatatggcacttgattatttgcttttgcttctttatctttcgcttgctttttagtttctacatttatattgatatttttaatatcgcctgtattgattaagttcgctgtataaatgcctgctttcaaatcgataacttttttcgtgccatttttaaaattaactgtaaatttcgcttgttttgaaagtcttaaatctacatcagttatacctctgtttgattttaaaactgattttacattattctctaaatctttataactaatttgttgattctttttaaatgttaagtttgataaaatgttttggcttgtaccattcacagtgattgtatacggcacttgaacatttgcttttgcctctttatctttcacttgctttttagtatctacgttaacactaattgctttaatgtcacttgtattaattaagtcagctgtgtgaatgcctgctttcaaatcgacaactctttttgtgccattcttaaaatgaaccgtgtattttgcttgcttagaaagtcttaaatcgatatcactaatacctctattaaagtacaaaactgatttaactttattctctatatctttataactaatttgttgattcttattaaatgttaagcttgataaaatgttttggcttgtaccattcacagtgattgtatatggaatctgtattttagaatatccatgatgtaatgaacttgatgatttatctatttgcttagctgcggcagatgcttcgttagtattaaagtttgctcctgttgatgctaaaacacctaatgctaatgttgttgtaatcaatgacttaaatttcataaattatctctccttttttatgtaattcgtgattgcaacttaattatagccagactttctctattttttgaattaactgaatattaataataaattatctttaacaataattttttaacactgttaaaagttcttttaattttgattaactaattaatttacaatacctaaaatgttgtttgattttgtttataccaagcttcaaacttaaatgtcattacaaccttcatttcttaaatccgattacatttgtcaattatatttacagcatctttatactcaaaaaacatttactcaaaaaacatttactcaaaaatataaattcgatttaataattaatttaaatttagttaatcaattttgcatctattttgttgtaagctatataaaaggagtgataatgatggtgaaaaaaacaaaatccaacacactaaaaaaagctgcaacacttgcattagcaaatttattattaattggggcactgacagacaatagtgccaaagccgaatctaagaaagatgatactgatttgaagttagttagtcataacgtttatatgttatcgaccgttttgtatccaaactggagacttttaacataaaattacttatcattcaaaaagtaaaacagcataatatcaaggtttataactttatcattatcaataatacctcatataaaataaaattttagggactttttagggactttaaatttaaaattacaagtttaatagaaacatcaaaataatcacatgtttgtgtggaatgtacaccccaaaagctagactgaaaaatctattttttgaggtgtatttttataggtaaatataataaattagagtagacaactcagaattccaattttataataatattgcttgacatatcaaactagatagtactattttgaatatattattataatcaaaaattcattgtaaacttttagacaaaaggaagtaataaaaacgtgaaatttaaaacaactaaagaatgtaaaagtaataatatctttaaaagaagtcaagaaattaataatagagaaagtgaaaagggttgtttatggggcattagcatgttgattctacttttcttattgattctgtttggaataactgcttgttcatcaagcattcactttattaattagatttttttacttggaggtatcatgtgaagaaccatacaaatataattaatatcttattagttatagtcaactcattaactcattttctaactctaaacacctcattttttaataattcagcatcggatttctgttttatcataggggctatatttttcttaatcggaatttttgttgcaatatacggtatgaagcgagcaacatattggttaaacttattgattttatttaccaatattttttattttctacacttctgtgtgttacttttgttaaaatatataggatttaaattatttatttatgaagggtgtgtattgttatttacctaatttatagtctaattgtctatttcatctgcattataaattttttcataatggctgcaccattcttaatgactaatgctgattatgtatggacgcctatgactacagttacgttatttattttgagtttgattattttcttgatatttataaaaacaaaagatgtcgttcatttaacaattttcatattaaacttacttttttcaatactttattgtttgcctatactgttttatttatgaacacttttatattatctagaaaattaaaaccacccgtaaaagggtggtttttttaatatttactttttagtgcttcgtcaatttcgttataaatcttttgaagttgatattttgcttctgacattttcttaaagtcttttgacttaagagcatacattgctttttgacctgaaatttttatagttcgcttataataagtgtttaaacttccagtagctaattcattaacatttagttcatctaataacgattttaattcattagctaacttttcgttttgatattcattcgatgttggcaagcttgtgctagcttgtgcctcatttttatctagattagttactagtggtgatgctaaaacgattgctaaagttcccgcaagtatagattttctaattttcattttttattctccttagtaattagtactaatttattttaatgactaactaaaaaaaagtacattaattattcattaactatatagatcttcttattaaatgaaaattaataaattatcaaattgacataccttattgtatttatagaaaaacaaaaaaaggtaagcaccgaaatgcttacctacttcccataaacaatataacacatatacattgatttggaaagcgcaaaaataaatttaatatactagcccgaaggggagcaatacataaaaaatgaaaggcgctccttgaaaacgcccaaggtaatattaacataaaatggctactattgcattatctaattttatttaattaaaacaaatatatagcacaaaaaaactagcccgaaggctagcttatgaatagatgaaaatttgaacacattgctgtgtctaagataaatataacacatattaattactattaatagaaaaattatagcgttttttagatcatttcaatttatcaagaccaaattcatcaaaacactaattgaactttaatttttagttaaaaataattaatcttttattaatttcaagttaattaatatatttcgtcgattagattaaactcattttaggaatttcgcagaactaactataaatttaaatatagaatttaaggagaattaacatcattatgaaaaagaaattagcaacaacagttttagcattaagttttttaacggcaggaatcagtacacaccatcattcagcgaaagcttttacttttgaaccgtttcctacaaatgaagaaatagaatcaaataagaaaatgttagagaaagaaaaagcttataaagaatcatttaaaaatagtggtcttcctacaacattaggaaaattagatgaacgtttgagaaattatttaaagaaaggcacaaaaaattctgctcaatttgaaaaaatggttattttaactgaaaataaaggttactatacagtatacctgaatacaccacttgctgaagatagaaaaaatgttgagttactaggtaaaatgtataaaacatacttctttaaaaaaggagagtctaaatcatcttatgtaattaatggtcctggaaaaactaatgaatatgcatactaatagtagttacataaattaaaaggtagatatttcttttttatataaaggtttggcagacatttcataacttgccaaacctttatatatctaattatcaaactgcactaaacttaccaaaactgcttattctattacctgccttgtctacctctcctgtcgctatataacgacattgtccactattagcaatataagtaatccatctatagccattaatgcaatatgcgccgtcatatttgatcgttgcgttattgggtaatacacctgtaattcttgaattagttgaatagccatccctcacgttattacctttaacattggcaactgtgtaataaccagtctcttttttatacggtacattgtttttatcgagtgtataacctgctggcactgtgaattcttttcatttttagctggtgttttaacattactgatacctgatacacacttccaataaaaataaccacaccatttaagatgcggtgtagcgactgtaatatttctatgttgttgagatatgtgtatcgagtgaagggcaaaaaggatatcaattgcaggataagtgttaggttactaggccacttaacaggctatatagttcactcctactatatacagttaattataacataaaaagcaccccgtaaactattatacgggaatgctaaagtcatatatactacgagggagtagtatgaaaactatgctctctatcataagaaaaaacacccagtgacatgcttgggtgaacaaggatagatgtaaatagttgatgcatgtgtaacacatcataacaaaaaactagcccgaaagctagctataacatacaatctaaaaagacgtcctttgaatacgtctagaaagattataacataaaaaaataggcaagtaccgaagtacctgcctaaaaaaggattatccactttttcatcctaactgatttctccccataagtcacctaatatctgattaggtggggaagaaccattcgtgcatgaatgagaatttgatgaaagataattttcactacacatattcaatcaagacattgctttctataataaacaactattttgttttatttcttttctataataacctttgtaattaagttgaatccagggtttttaatatgctctgataaatctgggacaacaaaacctttttctgttatagggaaagacttcgtttcttcttttttcttattcttatcataataagtgacttcgatctttgcgcttggatctaattcaactactctaaactctttatatgctgtcgcatctaatgcccattcgacatagtattcaattttttcttttgtaagtgtagtcccaggtttaataggaaactcgacataatgaggggatagcaattcatttcctttaccatcaactccagtcacatttaccatcaaatacgggcctgttggttcaaaataactcgcgtcatcgccttttttatattttcctttgtcgaatgaacttgatgcacttacctcattagtaattgaagaaaatgagaataataacaataaaacagttaaaaataataaacctcttttgagcatggcgcttcctccaaatataatatatttgtttttatttatctctttttatagctaacacccttatttaagatgataaatatcaacaacttcattttatattgagaaaatattaaaaatcaataaaatattaaaagaaactaaaattacattaaaaaataattaacaaatatttaacattttaacctaagaattaaaacacttctttcacaatcaatctctcatgccatatccactcattatgattgttccaataaatgcgacaccaaccatctataatttcaaacacatatattaatgttccaggcgcgtatacagcctgtccaacatcgaatctatagttagtacgattatcaccgtatctagtggctgaagtagcacctaagccgtcgattttcgcattaaaataagcaccttttgaccatttaaggttataaggcgctttacttccaactgttattttacttgcagatttaccgactgctttttgagcaggtggtttaactttatttgtgatcttattcattaagccctcacttttatacttaggtctaataaagtgagtacagccgtaataattatcccaacgtaactttgcaggcgtatttgcgttaccgtcatagttctgttccaaaattaaaaattggtttgtattaccaccattaaacactaaaccaatatgaccgtattgtttatatattcctttggtaaatacagccacatcacctatttgtggaacaaacgatggtgtgttttcatatactgttgccatgtttttaaaatcgttattgattgcatcttttgcatttccccacattctaatttctaacaaccaataaatgtaatcaactgctaaatctgcacattggtaaccataccaaccgtcaaaatcaatatatctaccttgataccaacgtaaccttgctcttgcttcactgtatgttttcattattttacctcctagtattttcttcttggttcttcatattctaaagcttggtggctatcacctatacctttagtagtcgggtcttgaatcacaccagttaatactaaaaatcctaatatagcgtttaaaccgtctgttaattgctctgtataaacttggatatcatacccaatagcttttgcgatgttttgagcaaataaaaagatagctgacaatatcgctacccaaaatgatttttgtttcattctaattttccaattaatcatattcttatctccttttacccaaaataaaaagacgactaataagccgtctatttgatatttatattatggtgtgttaatttatatatagaaaaagggcaacatgcgcaaacatgttaccctaatgagcccgttaaaaagacggtggctattttagattaaagattaaattaataaccatttaaccatcgaaaccagccaaagttagcgatggttattttttattgcttaattcaataagcttgattactagacctatcaatgcaataaggaataaaccaaactgcaacatggtactaattgtaatcattaggcgtctcctttctaaagatttcagtaatgccaccataggcaccacctccttatactcagatagccaccatctatccaacttgctcacttctgcatattaccataattacaacaataaataaaaagtcagtaccgaagcactgactaaaacttatttacatttaccgaaccaaaaacatgtccagaaactataaccaaagattagtttaaacattttattcacctctcttatatgcccataagcatacgcaataatgctataattagcgacccaaatattgtcccaactaaaccaagcacccacattttcatatcacgtatgttcttatcattttctttcttattcttttcatctatttctctttctttttgaatagcatctaaggttttatctaatttaatgttaacttgctcttgggttttttgacctaatttaatttcgttgagtgtgctgagcattgttttatcattctcttctaaccttctgatgcgccattcatgttcgtgttttttgaaccaccccaattcagtacacccgctttctaaaagaataaagattatgagtatctaactcatagcttttcatactgtttcagtgttaactgttacctctggagataaatctgatctttcaactacttctttaactactttcacacgttgttttttgttagttaattgatataacaaatttaacgtctccgcaattttcttagcgttttcttcagatttaaaatcttgagcatggttaaccatttcagaagttgtaaaacttcctgtgaaatcttgatatactacacgttctgtaccttctttgtcgatttgtactaaaataaacctttctgtattgttgataatttcttttgccataattaaatgacctccttaaatttttgtataaaaatagtgctaaagattactcttcctcagcacattgttgattttctttattttcttgtatatacgcttttaacatcgcgttttcttgtgttaacctcataatttcctgtgataaataatgaattgtatattcaggattagcttgtaatccttgtttgttatcctgcattctttgactcctccaatttcttgattcttagttgttgttctttgataacagggataagatgaatccatagacgatcatacgctataccttcaatttctcctttgtcatcatacgtgacaaactcttttaatcctaaattctccacctcttcagcaatcaaacctacgtatctatcaagtttataggtgtcttccgataattttctatcttctctcagctctctagctaaaatttcagactcagctttatcaaaccacgttctaataggtaagttaagaatagcttttgaatgttccagttgttcatctctatcgttatattgattttcgatagataacttgtatttacgcgctgatgtcgaacgcccaattgtgccagcagaagtaatatgcaaattagctgcggccgaataagtacgtctataaattgagttagaagctatcctatctcctgcatcatctgaacctacagacagtaggtctgtactctgtatatgaatatacctattaccatcacgtcgtttcagcatattaaatttgccataccctgcttcgattgttgtatctccacctgttgcatatcgtccattaacaatttgaacaagacctttatttctttctttagaaaacctgatacccgcaccgtaatcatagttctcatcagaaccaaacataatataaccgtcactcgaataagcattatctgcattagacagcgtgaatgcaaatcggtttaatccaggcactttgtctgtgtttggatataaatacaccggtgcctgtttgcttttgatattcgatgaagcgtaagactccagaacaacccgattattatctgacgttagtgcaacgacaccaccataggaattgattgttatgccattcataccgctatcactgtaagttttatcccaccattgaatagtaccggatgaacctccgtcttcgccttctccatcaatatatgttgaaataccaaaatgtgacatataaagtgaaccgcctgcggtattatttctaaaccttagatgtccatctttaagacgtgtgaatatatcatcggttgatcgtttgcctttccaagttcgttgcacaataccacctagttcaatagaatcattctgtatttgaacatatctgttattgttaccgcctttaattccaattctattaacattgatatcaagaccctctcttgataaattaaggctgttgacaatatcggttttatctactttatctcgcatattttggataagaaggtttatttctctattaccgttaatatcaattttatcagcatttaatctaataccacgtggccccacatttaaagcttgagccactccgttatcatcatatctgattgttgttccatctgtaacgttttggacaatctcgtttaatatatttgaaagtgtacgattggttgcattaaactcttctttagtagttcttaatttgatttccttaccattttgtataatttgagaaccatagcgagtcagtgttctcctctgtgcatctgtgctttctttgaccttgttgtctgtataagcattagctttcttttcagcgtttctagcctttagttctgcgttttgttttgcctcttcaagtttagcttgagcatcttgtatagcgcgttgctcttcttccgaaattttaccatcagcatacgcttgcgattccttctctttaagattatcttgagcatcaatgtatgattttaaagcttcttgcgcttcttgatttgcttgttcaatacttgctttaatctcaggattattggacaaatcacttaactggtcatcagtatattgtttttgttcttccaatccgtttcgatattcgtttaacgtaactttatctttgatttcaccttttaaagtcgttctctcagcttcagcagtatctaaacgttcaacaataccgtctttgtctgttttatagtccgatgtttttacatagtcacgtaattgttcttttgtggattctctagctgcttcaatagctgatttaacaacattaggttctccgactaactgcaaatcttcattcaccgttaaaccaaattttgttgctattatttccaacgcttctttatatttttcatcagtgtattgtgactgtaataatttaaatctatctgaaatggcgattttgacatcttctacatctgtataaacatcttgtaatttctttctatactcaagaaataaagtttttgtatctaccaaccgaccaatcgttgcagtttcgggtgtcatagattctaaattatttttaatttgattataaacatcaatcacagcgtctaaacttgcttgtaagtccgctttcaaatcattatctactaagtactcgctattcagtaattctgtagcttctgacaaaagactagcgtgttgtatagataaattaataaaaatattgtttaattcactgaatagcgctttctctcttgttataccacctaatttttcaacatcatttggtgttgcttcaatccatcgaccattccaatatctacgcaagacagcaacatcagggttacttgtatcataccaaagcgtatcattgactggattttctggcggtgtatcacttttatgaattttgcgttcaaagtattctaattcaccatctacaacatcttttactatagtattgatattgctaatattgtcgtttaatttttggtgtattaggtttaatcgcttgttaaactcttctcgtaattctgattctttgaactctttaggttgaccgaatgtatatgtgctattttctgaaattatgttatattcttcagcaataacttctgcctctacatacaatggcgggttaaaatctctatgttttactctgactgtatcgccaattgatataatctcgtgcggatacgtaacttccaaatcagtagaagtaatctcatatgacataactgccgacttacgtttatttaactctgttttggctaaagaacttaatcgtgtttcattcatattttgatcatctgattgtggttcatatatcccccaaatatagcgcataggtaggttgaattgactttgcgcttcgtcatctgtcacaactagctctaaacgcttccctttgtcattttcaggtcccacagcaattaatgctgttttgatttctgacatatcaatcttcctagttaacccgactaaatctttaccatattcaatttctttacctttgaataagctgtttttctttttgagtactacatatctacctttgacggtattagagctaagctcaatataaaaatctaaaaccattttataggttgtacataattgctttaaaacttcatatctagtttgataagaagtccatgacgtagtacgtaagccatcgtattcggtttgttcagaaacttcccaacctgtatcgctcaacacatctttcaatgcttctgaagttgtctttttctcaaattttcctggtgcatacggtttagctgttgttatatcagcaagataagacgctatacattctatctctgtgtagccgtccatcgtatcttgaacccagttaataataaattcacgccattgtttgtttgaatcccttataataacacgatgtcgttcacggaacttttcagctctttctgatgatatgagcagttcaagcatttctgaattgtcattaacattacgtttatgaatcgctctaactaaggaagggtcatcagtagaaaggaaatctataatcttgtcgttaaaatctaaaacatgtatcacactctcatctcctttctataaatatctatcttgccatttaaccgtcgtatcaaagacgttttcaggttgtatgattaattcactgtacccagaatcaacattgaaataattacttccaaacgatttctcgctcaacattggttcctcattgatgacaacactttttgcttgcatatctattttcactaaatcacctttttgtataatgacatcccttgcgcctttcggtttcggtagaatctccgtattgaatgaacctaatccattcatctccatccacttataaccgttatacttcgcactatagatagctatgatagaagctggacgctgataaaacttaccgccatctatccactctttctcatccatatcaataggtttacgtctatctgggtctttaatgtgatcaaatttccaagttttaatagaaaatttattacctactcttctgagccgcatataaacaacgattctgtccaagttatacattatcggtttattctgatagtcgtatatctttttggggtctcctttttggttatacaacgtaacaacaatatgtcctatttttctatcatgatatttattttcataaccaatagaagcaagtaacttaccatcactatcataaatatgttgtgctgttcttccggcacctttacctttttgttcaacaatacatttataggtaatttgaaaatctgtcatcgctttagggagccctcgtttcgtgccagcaccaacccaaccttttgcatcaggaaaattagttgctttatatccttcgccaagattggatatcacaaagtcaccgccgaccttaccacctaagtcattacttggaatatcttcagtaatcatcttagtccaacctttgaaatcacgaaactcactatgataaacaggaggcatgtaatccttaacttctttggttacctcatcatcaccaaccataaaataatcttcatcatttttagtaatcataaagtaactagatggtttaattgctcgggcttcaacaattaaaggagtgtcagcagtcccactatttacaactgaaacttggtctgaaatcgcagtatttttatttcctgttactgaatatttgtaagggtctgttagtactactttgatagtgaacttaacaggtattgtaaattctttgtgcagctttattggtccttcgaaataagcgttccagtaccaatctttagatttgaattgtaatttaacttgttcctcgtagttaaaaaactttactaattcattcaagacgtcatcatgtgttttaatgccgttgtgagataaatagtcattacgtaccaccaaaggtatatcaaaactataagattcaagcctacgccctttatatatagaccccgaacgtccatctacattttctgtttttaaaacataattaaaagagggtatttcaaaccctctttcgacatacaaccaaggaattgttttgttgttcactttaatagtgtctatcattgaatagcaattcctccttttctaaactttacttttgttgattcttgcctttctcgcttttctatagacgcgttcacctttttatcaaaagcgtattcgtcaataatcggctgataatctttatctgcaatcacatcgttagattgtgctattttcagtaataaagctatttgttgttgctgttgttcaatcattttcaataataagctaggatcatcaaacccgtttaagtctgataattggctaggacgcttatttttactcgcttttttccctcttacttctgctgctgcataatgcaaaatcttcattgcatcatttctacgagctggatctgttggaataatccattctggatgaccgtcttcacctaagttataccaaccatcaaaaacttttccacctgtagcatatgcgtaatcaccagcacgtttaaaaccaccccaaccatatcgtctaacaatgtactgcattgctgagataccttgatgtactggattattataattagtgtaccctcgtttagcgttagctctaaaagttgagccgataatttggaataatcctctagacgggtctcctctttgagcattaatatcccaattattcactgcatttgattgatagttgctttcacgctttgcaactcgcatcatctggtcatgaatccacttacctttataacgtcctcctaaaatactttgcgcttgtcggattactcggctggcataagttgcaccacttccagaagtagcatcaccgccaccaattgataacctaccttttttctttgcatttcttaaatatggttcagggttaaaatggcgtccgtttctcctcatttcaaaatgtaagtgtggtcctgtactaaatccggtattaccagttaaaccaacaacatcgccgggctttaccatcgtgccactaggtggtgatttgctaaagtttttcaaatgcgcaaatagcatatcgataacgccactagtaatttttacatagttaccataaccaccagacataaacggcattcttgtaagtctaccacccataggcgttctaacttcttgatatacaaatggaaaatcgacaccttcatgaaatggtcttccagttgcagcggtataagctgcggtacgtccataatgataattaattttgtcagggtctaatattccgccgactaaatcgccaccgcccatagcttctaaattttcttttatccaatcagtagcacttttcttaatcttagaccatgcagcttttgttatgtcgcctgcaattcccattcctttagttaaagaattgaaatcaattccaaaagcttcaagtatataatttaaaagttttcctggattttcaataaaatctaaaacatcgccaactttatcgccaagccatttggtacctttacctatttgatcttttgtccagttaaatgctgatgatgcaccggacttaatatctttccacatagtacctaaactaaatcttggaagagttccgtttaacattgaataagtttgtgcaccgttatatacttttgagcctttaggtaaataagcagtagtatctgtatttggtgtgattacacgtttaccattagggaattcaatcatttcgtttctaaaaccatttggaccatttccgcgtcccttatctccaactgtagcgaatgtgtcacgtgcaatcttaccgttcttaactaatcttgtagtagtatgtgtgtgctctgtaccagtatgtaacttaggtattttatccatgcccaacttaccaccgacccagtttaaaccgtcgattaatttattaagtccttttttaatagcatctaccataccgccgatatgacttttaattttgctgataatactttgtaagccgtcacgcatatttgtaaaaattccacgtaccttactccataaacggctagcaattcctaccgtattatctttaatggaattccaaatatttgacatccaatttcttaaattactaaaaatttctttcgtcgcattccataaattagtaaattttgatttgacgccactaaataatgactgcgcttttcctatcgtattcgtacggatactactccaagtattagataaccaatttttcatattcgtgaaaattgatttgacactattaaataagaatccaaaaatactttttgtcgcattccaaattgctgataaagatttactgaatatactttttattacgtcccaaatacctgctattaatccttttagcaatccgccaaagtacctaacaacgccaagtattttgcctacaaaccataattgaattaaattccatattaattgaacgactcctttaagaatcataacaatcgcatcccaaactcctcgccaatctccagtaaataaacttgagaagaacttaattaaacctagtatgatatttaaagctccttgtatcacaccttttatattctcccaagtactgacaattaaagctttaaccgccggccaaataaattgcatcacttgccaaatcgcaaacatgattggtttaattacaaaatttaagataaattcaaatatagctttgataaaattgcatatattttgaagcgcttgaacaatagaaattccgttttcattaaagaatccattaatttgactccaaatatctttagcgaaatcaacgattgctgaaaccgcttgtttaaagacgtttttaacggaatcaatgaaaggttggataaattgaatgaaattactaaacgtttgtttaacactgttaattgcaccattaacaaaatttctgaatgtttcagatttcttataagctattgtaaatgcgactgctaaaccagccagtacacctaacacgataccaattggaccagttaatgctgtgaagactgttcctaaaataggcactttagttgataaaaaactaatcaatccgtcagcctttgcaatactagctaataatggagctaatacagttactgcgttgccaactgtgcttatgaatgcacctaatccaaaaactacaggaccaattgcagcagcaataccaccgaatataacaatcgaccttttagatccatcacttaaacttgaaaaccaatcaactgctacagatagctttttgattaattcttccatgactggagcaaacgcactttcaatagaagcccatacatcagcacctactaatttaagtttattcattgctactttaaatctttcggagccactttcagaatctttaaatgtctgattgaccgttccttgcgaatcttcgatagtttttaagaactcttggtaactaaagcgaccgcctttaatagcatctgctaaatcaggacctgcctttgcaccaaatgcttcaatcgctaaacttgttgcgctagctatatccggcgtcttttcaatttctgctaatgtcttcttaaattcttctcttgggtttttaccagctttaccccaatttgatatagcttttttcaaaccactgaatgctatttcagtattaacgcctgacttttcccattgagagaataaagcaattgattctttcatctcaaagcccatagctctcattggagcgccgtatttagtaatactatcagctaatgtatcaacacttatcccactagcttgcgccgcttttgctaccatatccaaaacactttgatattcacttgcttcgatacctgcatcgcccattgcacgggtaattaactgtacggcttgcacaccgtcagaacctgttatgtgactaaatttcaagaatgactctgtggcactctcaagttctttacctgtaaaacctaaccttgtattaacttctcctaaaactccaccaacagtttcagcatctgctggaaaattgccataaacatctttaaatgagttctgcaatttttttaattcactgcctgttgcgcctgttgcttgagtaacagtatctaaacctttatcaacttctgcaaaagcttttcctgatgctgctgcaatacctaaaacaggtgcagttacaccaatcatcaaacctttaccaatggattttaaaccatcacccatttttgttaatttaggtcccatactttcaaaaactttactggtttttccccagccactttctgccattctttgagcttcaacttgagcttttttgaactcttcaaattcggctgatgttttttgtaattctctttctaaataattcagctcatttgcttgtttgttatattcttgtcgtaacttttgagcttctgcactgttttcgccctgttcttgagataccttgtcatattgcttggctaaatcatcaacgtttttcttataacctgtgatagttccatcaagttctttaatcctttgtttgtaactatcagttgatttttcggtatatttgaagttgttgcctgttaattttaagtcagaatttaaagttttaaagtttcgtttgatttctgcaaatgatctatttaaatttgctgcatctaaatccaaacctatagataaaccttttattctttctcccattttttacctcctttctaaaaaagttcaaaaaaataaccctaaccaaacggttaaggttaaaatgcatcaattaaagcctctgctttttcttcagaaatgtcattatttttattttgatatatggaaagcacataatgaaatggcatttttaaaacttcgttagcgtctttaccattttcaattaagtccatcatgagagtatccatatttttcaacattgctttatatgttaaatcttcaggctttatttcatgttctggataaaatttctagtttcctcagtttgttgaccttgagtaatgaaaatcacttgttcacgaagtgcattcattccatcaggtgcatgcatacgttcttttaggtctttaactgtgaattggttatcgtaaatttttacaaccatatccatcaatctgtcagcgatttctcttggcttcatcgtgctattttcgtcctcaatatcatcgattaaatccattgcttcgtatacaatttcaaatgaaatgaagtgtggtgttaagtacgtttgtaatttaatttcatttgcttttggatcttctactaattgaataatgttacgttttaattttgccattttataatactctccttattttcaaataaaatagaggggtttccccctcttatgcttctacatttattgttatagtgtcactcatattaccaactgttgctttaaccgtagcaatgccttgtgcttccgcagtaacttgaccatcactattgattgatacaatattcgtttgatctgttgtgtatttcaataacttactttgattagatggctctactacaacatttaaatcgtatgtgtcgccaactttaagtgttttaatgctatctggtatattaaccgactttaccgcagtttccgatgaagccggttttgttacaaagtttcttcgttaccctctgtcacgtttccagtatattcttcgcctaaaattttctttaagaaagcctcttcgcctttttcaccgtctccatcatgatttgtcatgttagctgaatcaaagatatacttacgtactgactttttattatcaactaaagggaaaagtgcctcaccttcaacctcttcacttgagaaatcccaatctttctcagccgtttctccatcgattttaggatttgtaaacataactttaggtaataaaactgttctaaatgtaccgtctttacgctcttgtctgaaccatacagctacgtaattgttttgtttaccttgtttctcttcgtaaacgccatcttcatcataatcttcattaaaaacaattttgcgaatctctttagggaacgcatgcatttgtaatgagattttaccttctccgtctgtattccctgattcaattggaccgccatcagcataagctgtttttagttctccaccagtttcaacaccaattttttgtaatcctcttgtttttgtaatatcactatattttaattccgcgccttctttcgttaatttagcgaaacctaaaccagtaatgttaatatacgcctttggcgcacttgcatgttttactgccatttaattttcctccttataaaaaatgccctcgtaaacgcgagagcttctatatgttttaaattcttctatatattccggttttccatttgaaacatttcccatttttagttcagaccataataacttttgaatgcgattagatatcttatttcttatgattctcgcattatattcatcattgtacttaacaaaaacatctatttggacaatataactatatgcacactcatctccgtcagtataagttgtaggtattgggtcgtcgatatcgtcaataacaataaaaggtacatcagtatcttttacattagggtatttattgaacttaatattattgatatttacgtgctctctaataattctgtcttgactaatcacttcatgaactttgtacaaaatatcaatcacaattttttcaactccctttttagcgtctcaaaatacttattttgcccttgtcttattgctctattaatcccacccatagctttaggttttacaaattttcctgactttttctcaacatgaccattttcaattaaatgtactattctaaatcgttcaaaaggcccacgccacctaattgtaacagtacgtttcccctttatccattcaggttcagtacgaccaatctcactaatcagtgctcctgagtcttctgaaggtttgagttgtttttttatttcttcaacaattaccttagcaccagctattaacgccttatcttgaacttttaccatctcttttatgccaaaatgtttttctaattctctttctaatgctttatcacctgtcactttcacactcatgaactatatcctccacgaatcataataaagtctttattatccaaatctggtgatacttgctttatattcaaacgatttttgaaatatcttgattcaatttcaagataatgttcttcactgggtaaataatcaccttgcggatcacgaatatacaatttaatgtcattttgcgttccgtttgagatagcttgttctaattcacgtaaccagacaccatcaatactcgcccaacagctatataataatttttcttctttttctccagcttctggaccattattttcagtatacttataaaaatgaacacgcgtatttaaacgtttagttgtaattctaggtttcttaaacactttcttcatcttctgatacctccattagagataacgaaaaatctattatttcaggtctgtaattgtcgttgaagtgttctaataaatcttgataagcatatctagcgcgtataagtatcaattcttgacctattaaattctctaattcaaaaactccgcactgattttttatacgctcgtacgacattttcaacaactgctttaagtactcatcctctgaattatggtcaatcttttcaagtgatttaaatttgacaagcaaatcatcaatcgtcattgtcttcaccattcaataagtcgatgatttcacttttaaccattgaactagacgcttttttttgtaatgattcgcatagttctaataattcttgttttgtcagcttatctaaaggtacgatataaactttgtcgtacttatttttgatttgatttgtcaacaattcaacacgaggattgttatacccttcagctggatacaactcccctactttgtacttgtgttgattgtgctctatgtctttaaattctctaacaactttaaatttcaccattttatcacctcataaaattttatagtgtttcttcggtatcttctaaagctggtttatgtccttttaaatctaatttccaaacagcagcaactttattatctttcgctttgccgtaagcaaattgttttgcagtgtataaatccatatcatctaacgcaagtgtttctttaaatttctgaacattaataccaccagctaaataaccatcatatagacctttaacgtacgttaaaaccttacctgcttcttgaactgtagactcaataacattcaaattaaatggtaaagcagtaacatatacgccatttgcatttaaatgtgtatactgtgcttgaacctcaaaagcatcggacggattaacaaccattgttacattacctttaaccgctactgatttacctttctcgttagttgagtggtatttaaacacttgcgtcaattcattaaccgtagcgcgcggattagcaaatgtaagcgtaccttgttcttctttctctggataagcaccatcagttaccgatacacctttttgtacttgacggtttaagccaatcggttggtctttaccagtaccttttaagaacgcagtttcaagcgccactgcaaatgcttcttcgatttgaacacgaacaaatctttcaatccacgcaggaccaaaatcatttaaatcttttggtaaaacaacaaacgctgtcaatttattttgaattgctgtttcttcactgaacgcagcatctaattgacctttaatttcaccatagattttaccccaaacggctacgccagaagtttcagattttaagaacttcaaacgcaaaccagcgtttttaatacctaaatcagctaataacggatgattcgtcgtcaaatcttcaaaaattctatcaattgtttcttctggcaaaagtttttcttctttatagttaacgtttttattgatatccatgaagaaacttctttggtttgcactcaaagattgtgctgatttaggtaaactagaaactctttcagcttctgcttttgcttgtaatttagtttcttcaaatagttggttaatcatgtcaccgtacaattcattttgtctttcttgcggttcaccgttgtttactgcattaataaattcgtttttcgcatttgcgaatgtttccgataaatttatagtcattttatgacctcctattttttgtattaaaaaaggaatcttgaaaatccatttgctgatactttactatctgcaacatcgatttctgattccttttctttcatatttattttttcaattactttatttgctattgcgtcaatatcaatgttaacctctggcgttttacttaccaaagctgttacacgatttaatacatctttcgataacacttgtgtattgcttgctacaatttgcatattgtcgttttcaaacattttactatccgcaaaaccttgttcaatggcttcatcagcatttagccacgtttccctagccatcatttctacaagttcttgtttgtttttaccagctctaaccgcatatgcctcagccattatttgaccaacatgttctaatgtttctgcagcatgatttagatctttcgcttctccttgcgcaatacttgaaggattgtgaatcatcattctagcaaccggactcatttcgatgtggtcaccagccattgcgataagcgatgccgcacttgctgctattgctgtgatacgaacattcactttgcctttatgagctcttaaatgtgtatatatttcactaccagctactaggttaccaccatttgagttaattataatatcaacatcttcatcactaaattctagttgtgttaaaacatctttaggacaagtcgaatccataccaagcatttcgtaaacccatttatcttcgttggaaacgatgacgcctttaatctccgctttcatcttcatcaccacctttcaaagtgttttcatctttttctttttcatcattttcaccactgttagctttttcgtagtttttagtaatcaggtattcgtctaattcaggattgtcagacggttcttcacctaacataatccgcacctcattccttgtaaatgaaccagaacttacaagtttgtcaattgcttcagcatattgaagtgggtcttttttattcacaccgacaatttctattcttgtatctttcaaatacatgctttgagttatgagtttcgcgtttaattcgttctgaatcttttttaataaaggtgttaaacagaacttctcaaatacaagcgtgtttttttccaaatcagctgtttctccgtaaatcaaacctgggggtataccaatcatcaacgcaacattttttattgcatctctcattagctcactcaattcagaaaaaggcatgttactattcttaccaccattagataattcctcataatcaaaaccttctatcaaaggcgcgattgctagttggtttttattaaaagtattgaataatttatttgtgaacgcttgtaatttttctatattcttttcgtcatatgcgctagaggcagatttcaaaatccctcttatttgatagttttttaattgtgcacctatcattcttccgaatattttcccgtaatcttcgaatagactttctacaaagtgtgtcactttattgttgttgtactttaaatatatgacctcttgcattgtgaaagtacgttgataagtataatctttaaccgttacatctttgaatatatcatcatacaaagcatactcttctctgtaaaagctatctgcgataagtaattctttgctgtcacttactacgattaaaacctcgttatcgtaaattagtttatatataacttgttgccaaaaactatcgcttgataagtcagtatttggttttatatttaacttgtagtaaacatcattcttttgaattctattaccttccaatactttaaaatgactttgagcgacagctcgcgcaacaaattcaatacaactatcaatcgctaaacgtttcacatacgcttgttgtgataaatcttctatcatatctaaatcaagcatatatgatatatctttcctagttttaaatatcttttctagaatactcatgtctcacctcctctattagaaatctatactcattaatgcatcaagtgctttagacatgtctttgtctactatatcatccgctctatataacgcatgaacaaatgccataaatccatccgttttacgtctgacttcatcttttttgatatactctttatttccatccggcttgatttttacagcaacattattagtaaaccaacgcatcaaaggattgtctccatatattacgttatgtttcgcaaacattgtatcgatacgtggtgcaagtaatccatgtattgcttttggatttctaagtacttcaagttttataccagcatcctcaaacgcacgtcttacaatatcagttctataattatcagctatgactttttcaagcccatatttttctctagcttttaaaaaccaatcaactatatattcaatttcaatgacatcatcatcgacaatggtcaataatcccattttttcccattctttaataggaggttctaatttgacatcatccaaaaacccttgtcttacaaacgaatgtcctaaccaaatgtaatcatcgttttttcggaataatagccctacacttgcaaaatctcgaatgtttgcaaagtctaaaccaccaatacacatttgattatctaaatttggtatctctctattagtcgctagtatttctttccatggtgctattactttttcaaggtcaacttcaggcaaattcattcgcttagtcatgaattcgggcttatttgaacggttgaatggtaaatcgttatattcttcttcaatcgtgcttagcagtgttttagcgtattctgataacggtttatgtaacattgggttcgccttttcccacgtctgtctgtcatcaacttcttttggatcgtctaatttacaataaaaagcaaacaatctactatttttaaccttgccacttaatacacttgcaattttgtgcttcattgcatcgatataaccctctctaacaaaaccatcagtacttatataaaacgttcttctatttttctttttacctaatccaccacgtttgacgtttaccatttcaggaccaaagaaataatgaatttcatcaaaaataacacacccctcacgtccaccgtctttggtttttgtgtttgatgtgttatatcgaataaccgatttagttgcacggtttattatttctgttttactaacttcataaggagcttttggcgttttacccgtcttatttcgtttgttatccattaaaacggttctgatttcatcaaacgatgtttttgcttgatcttcactattagcaacaatggagatgtgatattctttaactccgtgtaagggcgtagaaagaaaatcactaatagcacttattagaccgtttttcccgcctccacgtcccatgaaaatagcaaattctgtaaagaaagcttcatctgtatttttatctataagaaatatattagctatgataaacctttgaaatggtaatgttggaaaataccatttttcaataaatttgatacaatcctcgattttctgttcatcaaaatatacatcatctcgtgaatatatatgtgtttgtagataattaaagagatcaattctttctttatttaaaattatctttccttgtttccacaaatttatatattcatcaacgtatttattactaatcataggtaatcatcagatggcgtttctgtgtcttctttctcttcgggcaataaatccgataattgtttgattattttttgatatgcagcatctctagcattaaatagtttggctactggtctttccctttcatatggtggcgccttttcagattgagtaaataaatcataatcacctttttcttttatgtcttcccacatgtaatcaagcattacacgtagccttgctgcttgaataattaaaccatcaactacttttaatttattgctaggtatgtctttatataatacttgtagcctttctttttctttaagcactaaattttcatcgactataatctccatttcatcacctgccttaaaatggttataagaggggggttatacatggatttttaaaattatcgcgaagtttactccctaaccgttccccaagtattttgatcgcttttgatttttttgacccgggggtatttaccatttttcgtctttccatttattttctttttttataaatctcttttcttttttgttgtgacatttaatacacagtgtttctaaattgtttaagtcatgagcaaactccggatgatgttctagcgataatatatgatctacatccaacgacttacgcttgcttttgtcatatgtcgttaacttgccgtctcgcttacattgttgacattcataattatctctttctagcactctttttcttgttgtttgccattctttagacttatagaatcgtatacgttcgtctttagtcatcataatgtttcaccttatataacttaagtagtatcaagacgcatctatacttgatgtgtagtaatgtatttacaattagtttgaacatgttcatacctcataaataaaaagacacatcacatagtgatgcgcctcttgttcatgcgtcgtattagcatttaataactttaaatattaatctgatactaacataataaactgttttaatgcggacttacatagggtaaaagtccgctacacataaccaatatactttgctaacttatcgatcagtgcattccttctacgtaatatacttgtcttacttgtaccaaagtaatgtgctatatcttcccattcataacaaccaataggacaatcccaatatctaaaccttaataactcaagcgtatcctcatcactttcatctatcaatctatctacaccgttaactatatttcttaatgtattgtacctgttatcactaaacttctttattgcacatcgttcaatcggattacccggcaaattacttttgccagctcccgcattatctggttcatgactttcaagtaattcatattctcgcatcttcaactctcttcgatagttatcgatgtgctgaatgtattcttcaagctttttgatatcgtgtttctcaatctttatcattcaatgcaatacctccgataatataaattactttttaatatcgttattcattcgctttaattcaatcctgtattcttttaacccgttgtatcctttagttttaactacttcatcaagtagataatcattcatatatctgagcgcttgtatctcccttgcacgatcactattaatactgatacaaactaatagcaatatagcaaatacaatagtcatagtaatccacatcactcacttacctccgctcgaaagacgtaatcactcggcgcctctacatcatcattagccgtcatcataatatatacttgctcagttacatacttacctaactcatacatcgctagtaagaataataatcttagtatttgcttaatcattttttatctaccttctttacttcgtataagaccggatataaatttaaaaagtgtattctatatccaatcgtcttaacttttactttatcacctacttttaacctagcttgtatgtctgcgctatcaaactttcctttgaagaataagtctgagttttcgattacttgtttatcatctaatacaatatagaatttgtcctctttatcttgtcttttgttatatttatctgtaattgtcccttgatgtacttctttgttttggtaactagccactgtatagataggcaatgcgacaacaagtagcaatgcggttataccgaataatgacagtattccaacaataaagatgtcgaacccatccatatttttaagttttttaatcatttcccacactcccttatattttcaaacaactgacccactttaataactgcatcccttttaacttgtttctcgtacttctctttcgcttcttctttactctctgcctcaacaactgtaaacctttgattactcttagctttagttatgtgtgtatgtttacgtcctgttgaatctttgaatgttgtgactaagtattgtgtcacttccccaaaacctccttgactcgatctaagatgtctttacacgtatccttttcctgcgtctgctgttccatcttgtctttcatgattccttttcattttctttttgtatgcgtcaatgagttggtcgatagaatagtaagtattggcgtacaaaaacggcattattaaaacttgtacaatgctattatcaataccttttacaaattgttctgttagcgtatgcattacatgaacaaaataaactgaatgtagtttaggtaaagtaacttcattttcaatcaaatcaaccataacctcagtagtttcttccaaatcttcttcatcaacaatagtcagagttaattgcaaactgaaagctaagtaatcagcaatctcatctaattgtgtatctagtggcttacctggttgtttcttccaatttttaaaaaactcaagtgtgttaatccactctacaaattcaataatcatactagctactgtgtcatttaaatttctagttggtattctatcgtcgaactccttttgtatttgtaataacccttgtaactgatcaattgttaatgtgttagtcattttcctgtacctcctctacattaatttcatattcatcataattaaatgatgcttcaaatatcgcaataaaatccgcctcaatttctgcttcttctaaactttcagcctcgatagtctcttcaatcatgccagcgtatgtgatttggacattaaatttcttcattttcctgctcctcctcatatttatagaccacttgacccgtcataatccctactgcctcatcaagaccaatatcttctttgagtgcatcttgcatagcattaggtaaacccttaagtatttcatcaaacgcttgcgctttcttatatacgtcctcaatctcttttagtaatccctctgtgtcattaccgttatacgcactagtacttataacggactgttcgatttgttcgcggttattcattagtgtcttcctccatttgacctaaaaattcgtagaactcatttgttccgtctagttcttccattcgcgacagtataatatctgcagtgcttttacctcctatatagagagctcctatcctgttcgctttgctctcagggtgtagttctctaattttaaaacagtaatgttcgtatcttccaagcaattcatttttgactgtgcgccacatgttctccagctcttcattacgctctattaacttagctatatccacgataagctcatctcgttgcttcttgtactcatcacgttcgtctttaaaaacttttgattgagctctaaagtgtcttattgcactttgttcatcagtgatagagtcaacattttcagctccatgttttttcatgaaattaattaattcttctcttgttggttgtgtcattccgattcctccagtaactccggattttcaaacttattaccaataacttttaaatagctattcgcaacgcctctatataactcaaattcttggactgtgtctcttatcatcttgattacaaaacaagccttttctgcagaatgcgttattatccctatttctttaaaacgtttgtcatgaggatatttaaactctgcaatatcgccatcatatatttcagtgttgttcttatcttttaaacccgtgtattgtagcacttttacttcatcgaaacttttataacctgttgaaatcaaaatgtacccactattaaaatcgatttcgtcaataatactcataacttttttatctttatcccaagctttaaatttcagcatcattatattacctccactttttcgacttctatgcttgcagtttcgaacgggagctttttacgaatcagttttaataccatgttcgtggcttcttcctcattcgtacttttcacgaaataatgtttttttaatttgtaatcacatttagatgcaaagaacttaatacaaagacttactttataggtttgcatcattctaccaatctcccatctttccagattaactctcctaaacctttgccattcatcaagtaaatctcatggtatttaaagctcgaattaatcgggtttgaaccaacgagttcctttatcgacttattgttaattttagttacgtttattgactgactaccattagggaagtattgcgttctaactacaactactgacggtattaccgtttcttctgtgatttccttttccacttcgacttcgaaaggagcatcaagtggcacacagactgatgtcgtacactcatttgtgtccttttgaaaacgaacgatgccatcgccgttacctgttgtaaaaaaatttttgccctttgataactccggattacttctagcccacttaattaattcatctaatcgcatttcttttttaattttgattttcatcatttccatctcctctaaaataaagttagttgcttctgtccctcatattccaacccatgttgctttatatatgtttcaagctcttccgctgtatcaaatgtctttttaacgccttgccagcctggtacgatatgcccgtgaaagtaataagtgccattcactacatggatatgtgccactcgttcgttatcctgatacagatatctcttagatccgaaaaattggtttaagtattctttacatgcgctatcggttttaggcatttatgcttcctgccatttcttaaacatttggttataagtagtatcaaaccagtacggatcacgtgaatgtttttgaggcacattaaataaatgtggcttctttcttcttagctcagcctctttctttcgctctctttccaatttgcgttcgagtctagcttgttccagtctttctattgttttcttttctctgtactcgcttaaacgcgtaccttctggtgcgtccattgcttcatgtagttcccaaccgtcttttactcttttagaaaccattccgggtgttataccgtgactttcaattaattccatttcaaatttactgaacctataaggtttatcgtgcatccttacaattcttgctgttttcgccatttattccacctctacatttacatttctaatttttaaattgtcatactctagtaatttgtctggattcttatataagtaatctgccagcgtttctttttcatcatccacatcaccaaaatgcttatattcaacttctgtaggtattcttatatcaatcgttgcgtttatatatgcttgttgttgcattagatcacttcatttctcttttgtgttctcgtcttgctttaattaattcctcgtacgtaatccatgttttacctgtatacttaggtgctttacatatccaattgagttttatgtttctgtatttatgtctgaaaatcttagctttaagttttgctacttcggttggcatacctttaatgtcgataacttcaatcagtttgccatcgagatatagagcaaaatctgcaatgtattcaatctttcgttgtttatctaattttggtaataattcaaatttcggttgtatttcgatacgatcatagttagtgccattcttattactttctaaatattggtaatattcacactccactttgctatcaaatacaatccctttatactcaactttcttagcgttgtatttactcatcgtccacctctaaatatcaaatatcgttgcctgcaaacctaactgatgctcatataaaagcccgtgagcgcctttaaatcgttttaggtcactatcagtcataattttcttttcgtcgctgaaatgggctcttgagagcgaataaacttcatttacgttgtctttatacttgatgaccttaatatcttccgtgccatcttctcggtataagtaatatttttctttcggcattttttaacactccttaatattcgacgatagcggatctttcttctttttctttcaacttatcatcaataagttttttaagtttctcttggtctccgtttgcaaaatcaatcatcttttgagcatatacatctctacaatgtaatatttcttttatattttgttttgttattaccatgcatctcgctccctgaaatcgtctccgattactcttacttttcttgcattgtgtttcattcttgaattgatacgttgccagttcatattttgatttagttctttatcactaaagttagttgtaaagatgttgtttttacctactctgttatcaacaatgctaaaaagtttatttaaagtgtgttctgtgttttctacacccatatcatctagtacaagtaaatcaatatcacttagcaatctgactagctcgtctgtagtttcaactgcatttttgttgtatgtcgctttgatacgatccatcaacattggtatatgcataaaagcaactgtatgccctttagctttgactgcttttgctatagcgtatgctaggtggcttttaccagttccatatgaaccttgcaatattaatgattttggttcttttgtagagaagccttgtacgtactctattgctgtttgtttagcttgtacttgtttttcattttgcggcttatagttgttgactgttgcatctcttaaagacggattaacatttgattgattgaaaatataatcaagtttcttttgtttattccttttgtattcttcataagccaatctttgaatttcacattcgcaaccgtctttgtattcatatccattttcaaacttatataagtcatattgatgcccgcatttatcgcaattctgtcttagtattacttcgattggttgatatttttttaaactctcgtttattttttcgttgaataacggtttcataagatcctcctagtcccaataactttcgtcgtacttcatacgttccaattgatctatgccagtttctttaatctcttcgctataatcattcatatagctttcgttagttaaaaatgttttagggtacttttgatattgtttgtctgtaatagtttttaaatattctcgagtaccttgcatgatttgctcaaaagtatgtttctttaagcatgatttgaatttagtgaaagacatcttcttatcttttttcttgttgtaaagtttccaccattcctcaaattgctcatgcgtaacgtcagttgcgctattatttgaacttaagttcttatctatatctttttctttatctctttctaattctttatctaattctttatcttcttctgttgcgtgactgtcacgtgacgtcacgtgaccatttagcaattttctgttgttttctcgttgcttttgtttcctcaacctgttctgcgccctgattttctcgagtccttcgatgttttggtgcttttcccagtttgtcacttttatgacaccattaactttttcaatcatgcccaatgtctcaaaagtttgaattgctaaccttattgagttaataggtcggctaaactcatttgctaacatttcttcgttatacggcaagttttcagataacataatgtaaccttgttcgttgtactttcctgataaagttagcagcttaacccaaatggttatgatcgtatctctttcgggtaaagcttcgatatatttgattttgctgtcatcaaacatgccaactttaagttttatccacgatacttctcccattgtcttctcctttcagcgcttttattttgtccggtacttcccagttagatatgaattctttaagttcatctgtcataggtacgtcgttaaggatcgcgtcagatccatgcaggtatgacgaacatttgttgtaaactaatctcgctttgtttaaatcgtcatatccgcctaacgctatatagttgccagaataaaatatttttgaataatatctatgttttattttgtttattcctcttaaattgtttttatcagttcccctcttcaattgctttatgtttgttttatagtttctttttttcagcctattatcttctccaattatattaaggtaaccaacaccaccccaatattcattaactgcattgttgtaagcttttgctgcttcatcttcatttacaaagtgacctaagtttttggtttttttatcaacagctatacatgcataccaattattattttttttatcccatgaaacgcctttatatttagatgaattgttacacttcgctttgctccatcttgttttattaccttcagttgttagattttttcttgtgaaatcatttgtttttttattttttggaaacttttttttagaataaaatcaggtaaatgctttttatcactattcacaatcattctgtaattatctttaaaagctttatgccaagtatgctgattaactctctcgtaatcttcatcatcaactaaaatttcttctccatcttgtaaaaatatcgatttaaccattattctcctcctttcaacattttattgagcctctcatcaacttttatccacgagtcatgcaagtgatatttatcatcaaacgacttaacgccaatcgcatgttgctcgttgtgatgttcgcgacataacgctaatacatgtttgtcgtagtgattcatcttgtttctgttcatgcctctacctactgcttcgtaatgtgctaggtctgcgtgaggctttccgcatattacacagttgcggttgattgtagcccaatataataacgctttatcttcgcttaacaacttactcgtttctacactcataggtatttgatgatgaaacataaacgctataatcagttctattaactcccttgcaactttcatagaacagtcgcgcagactgatttcttcataacctttcataatttccaattctgtttgtaataattttctagttgattctactggttcgccccagtgaagttctatatctctacacattgcgaatatttttttgcgttgttctatagatagttttttattgtccggaacctctacttctgcttttagtggatatccgttttctagtaagtcaatgtgactttgttcaagttcaacaccagtagcaacgacggaataagtaccgtcattgtctttctggtatcttgtaatgtattgcatttaaaccacgtcctagaacggtaaatcatcatcattgatttctattggaccattagcattagcgaatgggtttgattgttgactcattggcgtctgtttcccatttgcttgctgttctttttgtttcatctcatcagttttaggttctggtttattaactacttcatcgtctttattccaaacttttacatatgagagtcttacaaaatacttgccttgttcctcgttaaatttatttttaagtacaatagttccgattttgttaattaattgatctgtgtcaaaagttaaatctggtaagttcaatttaattcctaatctactaagtaactcgatatattgtttttcttgataatcttgttggaatggtgggacgaattggttgtgtttgtattgtttaccttcgttgttttcaaaaacaatcgtgaagtatctgttttctctgtcgttaaactcgacatttgcaacttttactgtaaattctccagctcctaaaaagtccccacctttcatgaatgcctcttgattagtttcttgaatgtattgtgttctaccagtgattttcataatttttataccgtccttttaattaatttttaattaccatttctaattgcttgtacaacatcgttaatacttggattaatgaaacgtttgttgttaattttgatgttgcttgagtgtcttatctttgtctcgaataaatttgatggttcagcgttaagtacatattgataagttttttcgccgtcttgctcatgttcttctattgtcattcttgctaacacgtcagattgactgatgaccgctttttttatttggtcttgtgcctctatcgtgattgttggattgatagtacttccctcatcatctttgtctttgttaatgccctcgtgcccgcttatagcaagatgaaattgataatgttcttgtaatttagaaatataacgataaatacttacaatgcgtgtagcacactcgccccaatcattaaatgtcggtttctttgatttaccgtccatgatgtcgtccatagtgatatcacgtaacttttggattgtttcaatcactacaacatcaatttgttttccgttttctcttagttgttcaataattttaggcagcattttaatcactgcactaaaatgcttataattcttaatctgcacaactgccccatcttctgttaccgttgttccgtcctcatttatatctagtactaaggcattgttatcttttgttaaaaacgtagttttaccagtaccgaacttgccgtatatcgcaaatttataaaacttgtttgcattttgtttgctgatgtcttttacacctagttgcgttaaaatatcgacatcttgattagtttgttcagtcatgttctacctcctcgtactcaatagtttctgtcactgttttcttgattgctttgtgataatccatattgatactcgcttcttccataccgttaaactccctagctctatttctatttgtggagtaactaatatctgaattgttatcagttggtttgttagttatataaattggcatatccctatgacgaatgatataagttacagtctgcttcatagcgacctcctaccatttcatgactaagttaattagtctgtcctgttcatctgtgttctcttcaatccattcgtttataacgtcgtgcattgcatccattgcaatatatagttcgcttaaatctacgacataaaatgatttaagtggaacattattcatatccttaacttgtatactgataccgtcatgtctcttcatcgcagacactttaaattcgaacccgttaaagtttataattttattttttatctcacccgctttgtaatacattcttttagtcctccttgtattcttcgtactcctcttcgcactcctcgttatcttcttcgttttgtaattcataaattttgtttttcagttttatattttctttttccaattttttgttttttctttcttccgcaaaatacttacctctgtaagtatcttcttctttatctttaacagcctttatttcaataagttttctgtactcgttcaatgtgattgttactgtcaattcttgatttgctacaaaattatcttcttcatttctgtatcctgagaaatctttagtgtaataatgttgttctgttttaatattttcagccatagttgactacctccgtatattttgatttaattaagttgtatattttgatgaacacttactgttacttgttggcgcaagtagcagttttttattcttcataaaagtattctttatagaatatgaaagttgcaatacttgcgaatcccgcaattgaccatgctgtagttaagtatagaaacggcataagtacaatcgctaagactgtgaagcataatactgctaataggtagcttttataaatgttgctcattttattctctccttatatatttcattgaaatgctcatcgacgaatttattcatctttcttgcgttaaatctccagctattaaaattctcatcagggtaatgcacaattccttgcgctcttagttctttttcaaatctaggatgaaatagtaatctgtccttgatagtctcatcagatgcaatttttaatttcttctttaagtcactcatgttccatacagggtctaatgaataaccaattagctcatcatattcatcttttgtgataagtacatgtgtttcaggtattggaactgttacgtttaaaatatgtggcatttctatctttcctttcgtgtataatgttgttatctcctagtgaaaggaggtgatattggtgtatattgatcctttaaaaaatgttcgtttttctattaataacgtaattagtaatgttgaaatttctaaaagtatggcaattaaacaatctttaaaacctaagtaccaattagatataattaatagaaacaacataaatttattttctgacttcaaagtagactttcatctaaacaacttaattgaaatgaattttaatttgcgtaattctttttcatctctaacatttcaaagaaatttattttctgaagaaacgataaaatcttttaaggaactctataggtttgatgatgagattgtacttcaagcacaacagaccattagagatttttatatcaatccaactgctatctctactttggctgaagccatcaattcgacctatccaataaatgagcaaagtacctacaagagacacgatgaatttgtcaaacgtatcgaaaatgattttccacatcctttcaaaaagttaataagatggtctaatggcattgcagcaggtgctgacattcaaatctttgtaacaaactatataaacgagaacgatttacatattcaaaattcattgatagttgctatagtttgtttattaagttttttatcgacctattgttcacattctaaaaagtaataataaggcctaatttagttaaccttctttaacaactctgcaactgctcgcaacaattcagggttgttacttctttctaaacagtaactagcatgctttagtaatttgagttttaatttatttttttctttcgcgattctaaatttttgtaacatttgttatgcctcctttgcatttccaaaaatttaatctaacttaaattcttttccatctattaatccataaaagttattttttaaatgcggatgtctttcaagcgtcatttcaataaaacgcgggtctatcattaagtcgtagccatcgttgtattgaatattaacgggtcgtctattaccttcttcgtcatagtagtaatagatgacttttttgttttgagcttgcattgttcgttcctcctattaagatgtttgtttttctcctaaaaacttattaacaaagtattgttgtcctttgcctgttacttttggcgtcttactaattgatgtgtgaccgtccgaatgtgtgattgatgtttctttaatttcgaataactcacgttccattgaatactgtgtaggcatgttataatccacacccttgcgtttaataaggaatccgttttgacgtaaccactcaaacaatctgcgttgcccgatgtttataccgttttgtttaatgatctttgctaactctccaactaaaattgatgtcttagtagtagctactgcatctgcaaatacaatttttggtttatcacgttcaatctttgtttctaattgattgattgtgttgttagcaatttttaaagcacgttgcataatcatttctgggctattccaagctttttcaacttggatgaagtattgtcttgcacgtttgccaggttcactacgttgaatcattgcgatttcttttgcagtgtctagtgttagtgcgtggtctaaataattaatagtgttaccttgagctgttactcttttttgagtaagagctgtataatcaatattttcttcaaagccataattaatcattctttcaaaccaatcgttatatcttgtcttaacttctaatgcttgatgaagttctcgaccactgattgcgatttctccattttctttttcttgtatattgaacatttctccgatgttcgaatttgtttgtaatgcttgcattgttcattcctccttttacggtttaaccgttatttttggttaaaaaaaataatatcatcgtaggatatgtcaaatttttcttctatcttttttaactgcggaacattagggaaagtctttcctttttcccagttatgccacacatcagcagacacgccaactttagcgccagctttagcttgagtcaaatcatatttagctctcagtgtctttaatgttaccggttcttttttaacgatgatttgtgtcattgtagtacctccttgcttaataactgacttaagtatattacggtttaaacgtaatgtcaacacttaaaccgtaattttatttttttctcttgtgtattttacgattaagtcgtataatgagtgtgtagtattagatgaagggattgaatttataatgttaggcaacaaagaaattatggcaaaaaatatttctcgtctcatgaaagaaaataatgttgatagaaataaattgtctagagacttaaaaataagttatacaactttatcagattggattaacgcaaaaacgtacccgagaatagacaaaatcgaaatgttagccaaatacttcggagtagaaaaatcatcacttgttgaatcacctagcaaaatcgtgcaacttgatacactaccagttaaaaaaataccagttgtatcaaagatatctgctggcatgcctatttacgcagaagaaaatttaatcgattacatatacttcgctactaaaaatttgagttctaacaaagaagaattcggattacaagtgtctggggatagtatggacaaactctttcaagaaggtgacgttgtagttgttgaaaaggattcgactgttgaaaatggtcaattaggcgttgtattagtcaatgggtacaacggtactgtcaaaagaatacgttacaacaacgaccaaattattttaattcctgaatcaaacaatcctagtcactatccacaagtatacggaaaagatgacgagattaagattgtaggtagagttgtagcaagtcaaaaactattcaaataaaaggactgattatagggaaatataagattttagatttttcggaagaaaaaattattactcaagaatcgaactacggattaagaatacatgtagaatatagagtttaatcaaattgatttctatttttgattaagcaatgtttaaacttctatacaaacacactaaagaagagtggttactatgaaaagtaaattaattttatactatgaatttattttgtttgtactaacacttttggctattaccgccatttttataaacgatccacttctaaaaacaatagacattattgtttatgctatttttgttactgatgtgacggtacgcttgttgttaagtaaaaacaaaattaaatttattcaaaataacatttgggattttatagctataattcccttcgattctatatttaaagtcgcaagattaatacgattattcaaattgttgaggtgcttatctatactgaaaaggtatacacccactgttttgaacatacttaatcaacacggcttaatgaatgcgctcgtttttataaccgtcactataacatctttgagcgtacctgtatatttagttgaaccaaacataaaaacttacggcgatgctctatggtgggcagttgtaacaacgacaactgttggatacggcgatttatctccttcaacaattgtaggcagagtgattggatttattcttatgatatcgggaattggagttatagggcttttaacaagttctctagctagccattttatacggaaaaaacctcaatcgaataacacaatagaatttttaaaagaagaaataaatagaatagaagatttatccaacaatgatatagaacggatttgtttaatgctaaaaactttcaaaaaataatgacgatgagttttatatcactggtagagttatatagggagaattcatcacctatcatctcacttttaaatatatgtggattaaagaattgaagtattaattatgcttatttgaaaaagacgtctatttcagcagtgtttgaaaggaagtttataatgaaaataaaaaattgcaaaataaaaaaagaaactatagtatatgaagttttaactagtggtaatcaaccattcacttatgagttacctaaagatttatcgtcacataatgcgcgtaaatacttggaatttatttcgcaaaaattagatggcgataagttaaccaaagaagattcattatgattttactaaacaaaaaaacgcctactagtgtgaaaacgtattgattaacagcgcctgtgtggcgatttaataaattcatatgaatcaatgccaatgtatactataataaataagtatttgaaaggagatgaaatgatgtcagactataaattgtcaccaattgtcaaatgggctggtggaaaaacacaattattagatgcgattaatgcactcgtaccaaacgattttgctatctatcatgaaccgtttttaggtggaggtgcaacattattatccaatcaacctaaaaacgctataattaacgatcttaattatgaattaatgacaacatacaatgttatcaaacatgacattacacctttaattaaagaacttaaagatatgataaaacagcacaacactaataatgctaaagatttttatatgacagtaagagagcaagaaatactcaatttaaatgatatagaaatagccgcaagattcttataccttaacaaaactggttttaatggtttatatagagtaaatagccaaggtaaatttaatgtaccttttaataaaaaagacatgataaaaaactctactgtattttctgaaacaaacttaagaaatttaaataaatattttaacgaaaacaacatcataatattaaacgaagactttaacgaagctttaaaaaaagttaaagaaaatgattttgtctttatcgatagcccgtatgacgaagcatacactagttatcaaaaaggtgggtttcatgaaaaagagcataaagaactagcggaaaggttaattgaattagataaaaaaggcgttaaatggattgtgacaaatcataatactaagttaatacaatttttgtataaccaatttgacttttatgaaattccagtaaacagattcattaattccgacgctcaaaagagaagcaacgcaactaatgaagtcttaatattaaattacaaaccaaccaagagacaactaaaagaatttgaaagagcaaagttttataaacaattaaaacctacttcttttgtactcaaagaatatgtaaaatgggaaaaattgcaagaaaatgtaagagagtatgaattacaattaaatgatttaaatgtattaatggcaagtgacgaatttgaattcaaagaaaaattcgaacgtctttattcacaaagagccgaatcgtttgatattttaccgctgttcatatcatcccgtaataaacaaattgaatattggtcaagtgatggagaggctaaaaaatatggttttgataaaaaagaaactgttttcgattttctagtcgaaagcggtttaagagaaaacttgtttatgaataatagatataaaaatgtcttagactatatattaggtctcgaagttggattgagtagtaatgataaaaagaattacactggaacatggatgatgaatcaaatagcaaatttacttaaagaaaacgatatcacattcagaaaagaagtgccttacaaggaaataatcgatgcgaatagaattaaagataaaacttttgactttgtttttaataaagacgatgttacttattgcttggaagttaacttttttaatacgtctggtagcaaaataaattccgaagcagaaagatttatagaattgaataaagaattgcaaaattatgaagatatagagtttatatgggtgactgacggaataggactcaaaaaaaatcaaacttctataaataaagctatgaaatctattagaaatttatataaccttacaacattcgatgaatttctaaaagaattataataacgggtagcccgcctacccttattattttttgccaattttgaggagggaacgcatgaaaacacgttgttacgatggtaaaaaatggcaatatgaatttaagcatgaaggaaaaagataccgtaagaaaggttttagaacaaagcgtgaagctaattctgctggactagacaagttaaatgagttaagaagtggttttaatatagataactatataactcttgaagaatacttcgaaaattggattaaaacatataaacaacctgttgttaaagaaaatacctaccgtcattatagaaatgcattacaacatatacaaaaacataaaataggtaaaatggagttatcaaagataaatagacaagtttatcagaaattcataaacgactattcaaaagaacacgcaaaagaaactataagaaaaacaaacggtgctattcggtcagctttagatgacgcattatatgatggacttatttttaaaaaccccgcttataaagttaattataaagccggaaaacctacgaagtcagaacaagaaaaattcatctcggtaactgaatatgaaatactaaaagatcacgtcagaaagaagagaactcgttcatcattagcgctattcataatgatttgtacgggttgtcgtgtcagtggtgcaagaaatataaagattgagcatatcaaccaagtgaaaaacactatatttattgacgagcgaaaaaccaatacttcccctagatatatcagtatcgctaaatctgatatgaaacacattatggacgtcataagtacatttgcaattagctatgatggttacattttcaaagaagccggatctataattaaccttcatgctatcaataatgctttgaaatcagcctgtagagtcaataatataccaattattacatcgcacgcattaagacacactcattgttcttatttactagcaaaaggtgtatctatacattacatttctaaaagattaggtcataaaaatatagcaataactacatctgtgtattctcatttgttagaagaaaaatttaatgaagaggacaaaaaacaactaaaattttagaaagtatgtaatttagggacccattagggactccaaacccaataaatactgttgttacaaggtttctatgtatccaaactgggggcaatataaacgcgctgatttaatcggacaatcttcttatattaaaaataatgatgtcgtaatattcaatgaagcatttgataatggtgcatcagacaaattattaagtaatgtgaaaaaagaatatccttaccaaacacctgtactcggtcgttctcaatcaggttgggacaaaactgaaggtagctactcatcaactgttgctgaagatggcggcgtagcgattgtaagtaaatatcctattaaagaaaaaatccaacatgtattcaaaagcggttgtggattcgacaatgacagtaataaaggctttgtttatacaaagatagagaaaaatggtaagaacgttcacgttatcggtacacatacacaatctgaagattcacgttgtggtgctggacatgatcgaaaaattagagctgaacaaatgaaagaaatcagtgactttgttaaaaagaaaaatatccctaaagatgaaacggtatatataggtggcgaccttaatgttaataaaggaactgaagagttcaaagatatgcttaaaaacttgaatgtaaatgatgttttatatgcaggtcataatagcacatgggaccctcaatcaaattcaattgcgaaatataattatcctaatggtaaaccagaacatttagactatatatttacagataaagatcataaacaaccaaaacaattagtcaatgaagttgttactgagaaaccgaaaccatgggatgtatatgccttcccttactactatgtatacaatgatttctcagatcattatccaatcaaagcctatagtaaatagcactcaacaaaaaactcgcttcgttctaaaaagtcgaagcgagttatattgttaaaatttgaattgactaactttaaactgatatctcatcgttttcatttctttaacttccactatacctctacatgcctcatatgcacctaacaatatcaagttaggttatccataataaaagatacagtgtctcaagctatctatcccaaaacaaataaatagttacctactacgtgatacgcagcaggcaacttgcgaaaacttatttctgttctttatcattaattgttttaattaattttacatcatgtgtcttccaatcaacttcatataatgctgataatttttcttctttttgatctacatggttttcaccagaccaatagccccagaaaccatgtttgttccaatctaatttaaagtcatccattgatcgtttataatgaacgataaatcttgatttacctttatcatttttatcgtgtgacattacagctaaaaattctggattaaatccttctgacacagttacaggcattttatttttaggcgtgaaattatctttcgcccataggtttccgtttcgagttaatgaaaagatttcacttttcactctatcatcactgtcattagttagttgtctcgtatgatcatgtcccatattattgatagaatgtgcttctactttccaagctacacctttatttgttgtaggttgatcaataagtgtgcggtaagatggttgttgataactaattgtctctgaataatttttctcttttgtaatatttccagttaaaccaccacgattaattgaaaaatctccacctgttttatagccatacgtatatttaacttctcttgattcatcttgatttttaggcgcaaaatcagtcacatttgtactgttgttgttatcatcaacgttttgaatcgagactgaataagaaccaggccatcttaatgtactattccaataaccatttggatttaaaattttcaatccactgccaattgtacctttcgccttaataaatactgtctctttatcataatttggctcagtaagaaaattaaattgtaagctttgtgagatttttttctctgtatcactcgttgtagccgtacgtgtatacatcttcgtatcaccatcaaggttcttctcggaaactgtagtaattttagatttaatttctgcataagaagatgctggaaatacagttaaagctgttgatagcgctaaactacagattgtaatatttttacatacttgtttaatcatttgtcatccgtcccttctactttatccttctttatatggtttattttgatcagagtatttttcaacgactttaactgttttatttttccaatctacttcataaactacaataaatctttgaccatctttattttgttctaaaattggttgtccataatgtataccaggtttatttttcaaaatatcttgattacgtgtatatgtaacttcgaatcgtgttttttcatttgacttttcattagaaatataagttaagaattctgggttaaatccgcttcttacaagcgcaggatatctatattttgatgcaaaacttaattcaggattttctacagtagataatctagtatttctatagaataagaattcatcatttctgttcttaatttcattcccgtattttaaatcgttggcaacaacagaccagtgtacgtgtctattattatttttaccgctcgcaattgtgtcgtaattttgttggttataactgatagatttagaatagctattagatgatgttcgtccaataccttttgttgaatcgaatttaccacctaagctataagaaaatgtactatctactttcgcagtggaaattttattttttggcagttgatctaaaatttcagttttagggtttctttgtacttgaaaatcaacgtgatattcactcgggtattttaaccatgatgcgtttgtttcatttcgatgagattcaaactttaaatttgaatgaattgacccttgttttttgacaagtaagacattcttgtcatatgttggatcatcgataaagtcgaattgtaaattttgtaaaatatttgtctctttatcgtattcagatacagtacgctttgtaactttaccgtttttaccaatatcatcaggtcctggtgtatttttatctttatcattcacattacgcttttctttttgttgagccttatcaacatgttctttcttagtttggtcttgtgagtctttattcgctgaattcgcttctgtatttgctgctgataacaataaaagtgcacatgataatgatgacgcaatgaatacgcgctttttatttttcattgttataaccttctttcttatatttaatattgttgataggtatcgacatgtgaataatatcacaaaaactaagaatatatatttaactatttattaaatgattttgtttatattattaaatacttttttcgatataaaattaatgtgtgtacaaagtgattaaattagtaaatcgcattatttagtagttaatcaccatggatctatatgttatacatgcttaaactaaatttttttcatacaatccgactggacgattcacaatgaaaaaaacacttactatcagtgattattagactactgatacaaggtgcatattttaagatgtaatcatgaacatagcacgtcactttgttacttaaaattaatgtttaaatacaataattatgtttatataaatatatatactactttgaaaaggtgtgagcttaatgacaacttttagtgaaaaagaaaaaattcaattactagcagatattgttgaactacaaactgaaaataataatgaaatagacgtttgtaattatttaaaagatttattcgacaagtacgatattaaatctgaaattttgaaagttaatgaacaccgcgccaatttcgttgcagaaatcggtagtggctctcccatacttgcattgagcggtcatatggatgttgttgatgcaggaaatcaagataattggacttatcccccttttcaactcacagaaaaagatgacaaattatatggtcgaggcacaacagatatgaaaggcggtctgatggctttggtcatcgcactcattgaattaaaagaacaaaaccaattacctcaaggaaccattagattactcgctactgctggtgaagagaaagaacaagaaggcgccaaattattagcagataaaggctatttagatgatgttgatggtctaatgattgctgaaccaactggatctggaatttattatgcacataaagggtctatgtcatgtaaagtaactgcaactggtaaagctgtccatagctcagttccatttattggtgacaatgcaattgatacactgcttgaattttataatcaatttaaagaaaaatatgcagagcttaaaaaaaatgatactaaacatgagttagatgttgctcccatgttcaaatcattgataggaaaagatatttctgaagaggatgcaaattatgcatctggtcttacagctgtatgttcgattataaatggcggtaaacaatttaactctgtaccagatgaagcttcacttgaatttaacgtaagaccagttcctgagtatgataacgactttatagaatcgtttttccaaaatatcattaataatgtggatagcaataagctttcactcgatattccaagcaaccatcgacctgtaacaagcgataaaaatagcaaattaattactacgattaaagatgtagcttctagttatgtagacaaagacgatatttttgtttcggcgcttgtaggtgcaacggatgcttccagcttcttaggagataataaggacaatgttgatttagccatttttggaccaggtaatccattaatggcacatcaaatcgatgaatatattgaaaaagatatgtatctgaaatatattgatattttcaaagaggcttccattcaatatttaaaggagaaataagaggtatactgtcagctgccctattcgcgtgctggcagttttttattgcgaattttaagttgatagaaatagcgatgaatattgtttgaatgtaaatattcaaatatcaacaagcatatttccattgaataggtgatgtaaaactgaaactatagcgttgatttgtcatacttaaattgcattgtctgttgaaattgggaatccaatttctctttgttggggccccaccccaacttacattgtttgtagaatttcttttcgaaattctctgtgttggggccccgccaacttgcattgttcgcagaatttctttttgaaattctctgtgttggggctcctgactagaattgaaaagtaatacacatcagtaacatttctattttcatttatgatattatctaattattaatttataatataaaggagtatgcaattaaaatgaacaaagtccacaaacctttatatttttatttaatgcttttcttctctacaactatcataggtgcacttttattgtatttacctttcactggtaaaaagccaatatcttttttagatgccctatttatagcttcaagtgcatttacagttactggcttgtccccagttgatataggatcacagtttaatatacttggtgagatagtaatactattattaatacaaataggtggtctaggtatcgtaaccgtaaccctattgacactagtatttttaaatagaaagatatcaatgaaaaatagatttttgattatggctacatggaatattgacgaacctggtggtgttattaagctaattaaacacttggctatttatagtttagtcactgaattaattggtatgatttgtttgtgtttatcttttataccaaaatttggtataggcaaaggattatttttaagcttattcacatcagtatcagcttttaataatgctggatttgccctttttaagaataacttaatagattattctaatgatccaattgtcattatcacaatctcaatactcataatatttggaggtattggacattttgtcgtaatagactttattaattgtaaaaaattgagtaaattatctttacattctaaattagtcttaactacaactagtatcctaataattataggagctattacattctttttattagaacagtttaatactatgcaaaatatgggactagttgaaaaaatcggaaattcttttttccaatcaataacaacacgaacagcgggctttaacagtattgatatagcaagcattaacaaatctactgctttaatgttaatgctacttatgtttattggtggtgcccctctcagtgcagctggaggaattaaaataactacttttgcagtagcgtttatttttgtattaaattatatacgtaaagaaaataatgtttcagtattcaataaagaaatatctgacaaatatataaaactatctattgttaccattaatatctcatttctatttatcagtatcattacttttatattatcgataattaatccgaacatatcattaatcaagttattattcgaagtggtttctgcatttggaacagtcgggttaagtatgaaccttaccacagaatatcatggtattactaaaataattattatattcgttatgctttgcggtaaagtaggactattaactttattaagaacatttataccaccaaaaagtccaaaaaattaccgctacactaaaggacaaatttatctataaaataactatccatctttaacaagaaatgaactagtgttttaatctattacatttaaaaaactacctaaacaggtagtttttttgttttttatttattttaggacgacaaaacgtcttatatctttaaaaaagcaaatgcataagtacacctttaaaaagatctactcaaaactaaactatacaatgatttaaatatttaaaacttattttttactacgttaacctcaattgttgaaaagatgaatgaaaatgataatttaataatgtatacttttgattgtttaaacatgtacattttctaaaattctagagataattttattgctgtgaacaacaatgaaattatcttcagacataaatacggattttgaagttactactctttcatatttacaaaaattaataattgttatgatgaacttaaacatgaaaataagcaaaagtgaaatagctagacacatgggtgttgatagaagagcagttgataaatattcaaatgtctttgacctttattttataaattcttccataaaaataaccacacttctaaatcaataggtgggtgtggttttgtgctttatattttaagaatagccatcttcaaattattttcacttgtatgatctttgatttctgtaaatccaaattttctataaaattctcttaatctatctacatcctcatactctatccaaatatatgaaccgccaaatatgttcgcaccttctaaaactttcacatatgctaaagttaataaatcgtttgcatttatggattttgtagccaatgcttcttcagaataatttttttctatttgagcaattaagtatccttgtatgattaaattgtcatttccactgtgagtttcacccttttgatataacttcttctttaacgtgtttgatattttatctaacatacgttttgtaaaaaactaagggtttattgctaattgtaaaatagccaactagtatttgtttgtttttgaattgtgaaaaaactaaatgaattctagacaggttttgtctatcaaatgctatagacttatttttcaaaaataaatcaacatcgtgtgctgattcacttcctgaaattgatattgtctcaaatgaatttagtatatttaaaactgaaggtatctttcgcttaacctcttgcttatcacctgttaacaattctgaaagtgatattacttttacagtcaattacttcgataatccttcaatagattttcaatctcacaagttgattttattttagtcgcttttatgtttgttttgttcacattactattattttcgttaatctccattgcatctattagtttttgcgctgatttttttgtgaatttataatcagtagtaatacttattgtagccatactactcacttccttattttacttcatttgacaaccaagtatacattgtctacgttgtcttcttgtttacaatgtatcatgaaagcatcttttcgacaatagattcaataaatttctttagtgtatatgattttacacttaaaccaatttgtttcttagcataaaaacacccatgctgtaactagtgtgggtgttttcaaaatgcagacagcttcttattacaatacgcaagtgagtcctctgcaaagccgaattgattaccggaaatctaattacattacaacatactagaagaaactccttatatactcaaaaggtatactaaacttctctatataatctatatgattttaacattgaaaaaaccccccattatgaatctaaataacacatcagcacataataaagacgccttccaaaagttttggtaactaatggaaaacgtcttaaaaacatattttcatacgctctaatatttatttggaacgaatcatactcgtgcataatgtaattttctagttagtcaaaactagaaactgttttacatcattcctggcatgccacccatgttaggttggtcattatttttttctggaattgatgccacaaccgcttcagttgttaagaacattgccgcaacacttgctgcatgttgtaatgctgagcgtgttactttagttggatcaacgatacctacttctaacatattaacccactcgtttgtagcagcattaaaaccaacacctggttctgcatttttcaagcgttcaacgatgacagagccttctaatcctgcattttcagcaatttgacgaactggtgcagttaatgctttaagtacaatattcacacctgtttcaatgtcgccttcagcttcaatttcacttactttttggtaaacatttactagtgcagtaccaccacctgcaacaataccttcttcaactgctgcacgtgtagagtttaaagcatcttcgatacgtaatttacgttctttaagttctgtttcacttgctgcacctaccttgataactgcaacaccgcctgctaatttagctaagcgttcttgtaatttttcacgatcaaagtcagattcagtttcttcaatttgagatttcaattggcttacacgtgcatcaatgctgttttcgtcaccgtcaccatctacaacagttgtattatctttagtaacttctactttacttgcagtacctaacatatcaatcgttgcatctttaaggtctaagcctaaatcatctgtaatcacttgcgcaccagttaaaatagctaaatcttctaacattgctttacgacgatcaccgaaaccaggtgcttttactgcaacagctgtaaatgtgccacgcatacggtttagcacgatatttgttaatgcatcgccttcaacttcatcagctacaattaagattggacgattagattgaaccacttgttctaataaaggtaagatatcttggaaagaagagatttttttatctgttactaaaatatatgggcgttctaattcagcaaccattttatctgaatcagtaaccatatacggtgattgataaccacgatcaaattgcataccttcaaccacttcaagttcagtgttcaagccatttgattcttcaattgtaatgacaccatcgttacctactttttccatagcttctgaaatatagcgtccaatttcttcatctgctgctgaaatcgcacctacttgcgcaatttcatttttattttcaactttttgagaattttcatgtaacgcttcaacagcaactttaactgctttgtcgataccttgtcgtaaaccaactgggtttgcaccacttgtaacatttttcaagccttcttgaatcattgcttgagctaatactgttgcagttgtcgtaccgtcaccagcaatttcatttgtcttatttgcgacttcttgaactagtttagcccccatattttcatatggatcttctaattcgatttctttagcaatcgttacaccatcgttcgtaattaaaggtgctgtaaactctttatctaatacaacattacgtcctttaggaccaatcgttactttaactgcatttgctaattggtcaacaccacgtaacattgcttgacgtgcatcttcagagaatttcaattgtttaaccataagtgataaacctccatttgtttagtcatatttcattttcgttctttacaatctatctatgaattatattctatattattcaattaccgctaaaatatcttcttcatttaaaactaaataagtctcattatctcgtttaacttctgtacctgcatattgttggaacacgacacggtccccttctttcacttcaggagtcactcttgtaccatcatttaataggcgtcctgttcctactgcaacgataacgccttcgtttgatttttctttagcactatcagttaaaacaataccacttttagttgtttgttcttgttcttttttctcaataatcacacgatttccaattggttttagcatgattgttcctccttaaaaaacctaaagtttagcacttaactttatagagtgctaacatacatttataataatcaaatttggtcaaaacttcaagtcataacctttcaattaagttttgtaacttcaagttatttacgataaaataaattataaacaaatatttggaggaaaattatgacaagactatgggcatcattgctaactgttattatttatatattgtctcaatttttaccgcttctcattgtaaaaaaattaccatttgtacaatatagtggcatagaactgactaaagcagtcatttacatacaacttgttctatttttaatcgccgccacgacgattattttaattaatttaaaaattaaaaatccaacaaaattagaattagaagttaaagaacctaaaaaatatatcattccatgggcattgcttggatttgcactggtaatgatttatcaaatggtagttagtattgtatatactcaaatttttggcacacaacaaacaagtccaaatactgagcgtttaatcgttattgcacgtaagattccattgtttatctttttcgtatcaatcgttggtcctctattagaagaatatgtatttagaaaagtaatctttggcgaattatttaatgcaattaaaggtaatcgtatcgtcgcatttgctattgcaacgactgtaagctcattaatctttgcattagcgcataatgactataaatttattcctatatactttggtatgggcgtcattttttcattagcatatgtatggacgaaacgacttgctgttccaattattattcatatgttacaaaatggatttgtcgttatattccaattacttaatcctgaagctttgaaaaaagccacggaacaagcgaattttatatatcacatttttattccataatataaaaaacgaatcacacacggattatcgtcgctgtgattcgtttttatttttctttttatttcgctttacaaataagaatagcatgattgaaaataccaccatcatagaacatacaattgctagccaacttttactatatgcagttgacgcacttttcttattatcttcttgtttttttacaactgtaaaatcatctttttcatgaggctcaaatgaacgttgttttgaatccggcttatcttcgggctttttcaaatctggcattgatccaatttcgccagtaattaatgcgagtacttgttcatctaaattacgatagtacctttctgatttcaatggattgaaatattggaatctaaagtaattcgattgctgttgtaatccatttaaatatgcatttccgctgaagttttgtttacggatgatattgtagatatcttcatcagttacctcaccatattctttccccaattgattaatttgatttaaaatatacggattatacttgtaagccccattcgccaaggctaaaaatcgttgggatacaaaatcattaccagtaggattttgtgagtttccttgatttccatttggttgccattgaccttgattagatccatctgaagcatttgggttccatgtccccccatttttcgagccaccagattgattggaatccccaggttgattgggatttggagacggatttggatttggcttattagggtctggttttggattcggatttggatctggttttggatccggatttggcttcggtttgtctggatctggttttggatccggatttggtttcggcttatctgggtctggctttggatccggatttggctttggatccggatttggctttggtttatctgggtctggctttgggtctggctttggttccggatttggtttcggcttatctgggtctggcttcggattcggacctgggtttgggttatttgggtcaggttttgaatctggacttgggttttggttgtttgagtctggcttcacattattcgaatcaggattagcatcacgactattcgaaccagttccttcattaccagcttgatttgattcgtgaggtgtcccagtctcattattattcatttcactatttactgatggtgaagttacattatgattcaaattagtcgttggcttttctccatttaagttatcctttgcttcaactgtgtgcgttgcaagccctaaactactactactacttaaaattaacatacttgttgaaagtaacattttcttaaaccaatgatatgacatttcacgagacacctccctttttcatataagtattaatctaagtataataaatatgcgttgaaaatgcatttatatttggaatttgaaaatgaatattaatattcttgaaattttcgtaaatattactttacaagttcgagtataaattttatactaagtctattaagtattctttactaaagaaggagtaatgattatgggtttatttaaaaaagataaaaaagcaatgacttttgacaacgcaatggaagaaagacgttcaatatataatttgaaagattcaatatcaattagcgatgacgaattagaatcaatgattgcacatgcagttaaacatgttccttcatcatttaattctcaatcaactagaattgttctcttattaaatgacaacaataataaattttgggataacacaaaagcaattttaaaagaagtcatgggagagaatcgtgatttcgagccaactgaacaaaaaattgataacttcaaacattcatacggtacaattttgttttatgaaaatcaagatgttgtaagtggtttacaagaacaaatgccaaactactatgataattttgcaatatggtcaactcaaacaaatgccatgcatcaatttgcaatttggactgcattagctactaaaggcataggtgcttcattacaacactataatccacttgttgatgagatgacttcaaatgaatttaatattcctaaaagttggaaacttattgctcaaatgccatttggtgatattcgtgaagctgctggcgaaaaaacatttaatccagtggaagatcgtttcgtaataaaaaaataatcaatatattgttgggaatgggacagaaatgatatagaatcattagttattcattatgtagtagttcttacacattagccgctgctaatgtgtacttaagaataggaatacatgagtaaaactcatgtataagaaatactaatttctaaagaaaaagtatttctttacgttagagcccaccccaacttgcattgtctgtagaaattggtgttccaatttctctatgttggggccccatcaactactgtcaatataacattgtagagcctaggactttgattttatgtcctgggcttgttttttgcgtttcaacataacttttagtatgttatatataagatctatcaaggatgtgatgttatgaaagtccaaatttatcaattaccgattatttttggagatagttctaaaaatgaaactcaaataacgcaatggttcgaaaaaaatatgaatgctgaagtagatgtagtcgttttacctgaaatgtggaataatggctatgatttagagcatttaaatgaaaaagcagataataatctaggacaaagtttttcatttattaaacatttagctgaaaaatataaagtcgatatcgtagctgggtcagtttctaacattagaaacaatcaaatatttaatacagcttttagtgtgaataaaagtggcaaactgattaatgaatacgacaaagttcatttagttcctatgttaagagagcatgaatttttaaccgctggcgaaaacgtagctgaaccctttcaattgtctgacggtacttatgtgacccaacttatctgttatgatttacgttttccagaattattaagatatcctgctcgtagtggtgctaaaattgcattttatgtggcacaatggcctatgtcacgtcttcaacattggcattctttactaaaggcacgtgcaattgaaaataatatgtttgtcattggaactaatagcactggattcgatggtaacacagaatatgctggtcattcgatagttataaatccaaacggagatttagttggagaattaaatgaatccgcagatattttgactgtagatttaaacttaaatgaagtagaacagcaacgcgaaaatatacctgtatttaaaagtattaaattagatttgtataaataaaaagcacacgaaataatatttaacacatgtcatgactaaacatagatttatgagacgatttttcataagcctatgtttatttttttataatagataactcagtaagaaccagtttcgcccttagcaaatgaatgattttcttaattaaattgattattttttttgaccttttccaacattagacttattcatatattttaacggtggatctcataatgaggattaactcttccctactttattacaataaaaaaaggccgcgagcttgggaggggctcacgaccatacttattattaagggaatgttttacagttattttttcaatctatttttggggatgttattaattatgaaaaaaaattttatttatcaaataatgataaatcgatgttgtttacgatagcttacatgctagaaataattatctgtaatgataattaagaaaaatacatagcactgagtccaaggaaactaactctactagcaaatgttactcacttgctaattttacatggttattaagttgggatggcttaataactcatacttttagtactatacgaagataacaaatttacaatgaaagtaattaattattcatcttattttttagtgaatttgttcactgtgtcgataatccattttactaagtcaccgattgttgaaatgatatcttgtgccattgaaatcactccttccttaattaagataaaaattcttaaaattaaacaactcatcaactattttccatcacatctctgtgatctagttatattaaaacatgctataagcatttattttccattttttcttaactagtcgttttttattcttaactgtaaatttttttatgttaaaatattaaatacaaattacatttaacagttaagtatttatttcctacagttaggcaatataatgataaaagattgtactaaatcgtataataacagtgaggagagtggtgtaaaattgaattattttgataacaaaattgaccagtttgccacgtatcttcaaaagagaaataacttagatcatattcaatttttgcaagtacgattagggatgcaggtcttagctaaaaatataggaaaactgattgttatgtatactcttgcctatattttaaacatttttatcttcactttaattactaatatatcgttttatctaattagaaggtatgcacatggtgcacatgcaccttcatctttttggtgttatatagaaagcattacactttttattgttctacctctattagtactacattttcatattaatgaaacactaatgatgtttttagcattattaagtgttggcgtagtgattaaatatgcacctgcagctactaagaagaagcctatcccggcaaggcttgtaaagcaaaaaagatatttttcaattataattagtacaattcttttcattatcacactttttgtaaaggaaccatatacccaatttattcaactgggtattattatacaagctattacattactaccaatatactattcaaaggaggactaaattatgaaaaaattactcaacaaagttattgagcttttagttgactttttcaacagcatcggttacagagccgcctatataaattgtgattttttattggatgaagctgaagtaccaaaagaattaactcaattacacgaataactataagagaaagtgtgatagtaagtggaagcattaaatgattataattacgttttatttgtaattgttcaagtttcattaatgttctttatatctgcatttattagtggaatacgatacaaaaaatcagattatatatacattattggaatagtgttatcttcagtatatttctttgacaaaatcggaagtatttcactagttgttataacgatttttataataatttttctctattttaaaattagactatattctgtatttttagtaatggttactcaaatcattttatattgtgcaaatttcgtttatatcattattttttcatacattataacaatttcacacagcgtgtttatagttctaccaatctttttggtagtgtatgtatcaatttcttatgcacttgcctacattttaaatagaatattaaaaaggataaatggtacatacctttctcttaataaaaaattccttactgttataactattgttatagtaataacattctctttgttatttgcatattcgcaaattgatgcgagtgatgcatcaacaatcaaacagtattcgcttttattcttgggaattattatattactgagtatcttaatttttatttattctcaatttactcttaaagaaatgaaatataaacgtaatcaagaagaaattgaaacctattatgaatacacattaaagattgaagcaattaataatgaaatgcgcaagttccgtcatgattatgtcaatatcttaacgactctttcagaatacattcgtgaagatgacatgaccggtcttcgagactatttcaataaaaatattgtacctatgaaagataatttacaaatgaatgctcttaagttaaatggtattgagaatcttaaagtacgtgagattaaaggtcttctaacagctaaaattttacgtgcacaagaaatgaatataccgattagtatcgaaataccagatgaagtaactcgcattaatttgaatatgatcgatttaagtcgcagtattggtattattcttgataacgcaatagaggcatcaagtgaaattgatgatcctatcattcgagttgcatttattgaaagcgaaaattcagtaacgtttattgttatgaataaatgtgcagatgatataccacgtattcatgaattgttccaagaaagtttttctactaaaggtgaaggtcgtggtttaggtctatcaactttaaaagaaattgctgataatgcagacaatgtcttgttagatacaattatcgaaaatggtttcttcattcaaaaagttgaaattattaacaactagccataaggatgtgaatgtatgaaaattttcatttgcgaagacgatccaaaacaaagagaaaacatggttaccattatcaaaaattatataatgatagaagaaaagcctatggaaattgccctcgcaactgataatccttatgaggtgcttgagcaagctaaaaatatgaatgacataggctgttactttttagatattcaactttcaactgatattaatggtatcaaattaggcagtgaaattcgtaagcatgacccagttggtaacattattttcgttacgagtcacagtgaacttacgtatttaacatttgtctacaaagttgcagcgatggattttatttttaaagatgatccagcagaattaagaactcgaattatagattgtttagaaactgcacatacacgcttacaattattatcaaaagataatagcgttgaaacgattgagttaaaacgtggcagtaattcagtgtatgttcaatatgatgatattatgttttttgaatcatcaacaaaatctcacagactcattgcccatttagataaccgtcaaattgaattttatggtaatttaaaagaactgagtcaattagatgatcgtttcttcagatgtcataatagctttgtcgtcaatcgtcataatatcgaatctattgattcgaaagagcgtattgtttattttaaaaataaagaacactgctatgcatcggtgagaaacgttaaaaaaatataataagataataaagtcagttaacggcgtattcaattgtaaatcttgttggattttaacaagataactagcaaatgcactgtatagctggctttttattttttaatagcaaaaatttaatttaaagcgtaaatttaaataaaacgatacaacgtttcattgtatacctattcctattactacataatttatcaatttctatttcactctacaatcctatagcgcaatttttaacaaaatatactaaatttgaaatcgacagtttccataaataaaatgctacaatatcctacccaataaatcttattttgctcgcaaaaaaacagtgtagcacaagattcaacttgtttcctacactgttttataaatgaattatttaaaatgcttgttcaacctcttgtaatgttggcaaactattaatagcaccatacttcgttgtcactattgcagcaacgcgattgctaaacgctaaaatttcctcaccttcattttcaaataactgagttaaatttaacacatcggttgctaaaatcctgctaataactgcaccaataaaggcatcccctgccccagttgtatcaacagattttaccttatagccactatgataatgattaataccatttttcaaatatacggcagcaccatctgctcctttcgtataaatgactacagtgacattacctgtaaataatgattgaatggcttcattttcatcatgaatacctgtaataaattctaattcttcatctgaaacttttacaatatgcgccaatggcaaaaaggtatgaatagtttgtcttaaatcttctgcgttatcccataatggcaatcttacattaggatcaaatacgacagtaccatttgcatttaatgttttggtaatcaattgataatgcgcatctctcattggactatcgaccaaatcaacagaacaaaaatgtactacatcgttttcattcacatcaatatcattcacaaaacttggttcaaataacatatcagcagagggcttacgataaaaagaaaaatctcgctctcccgcttcagtcaaactcacaaaagctaacgcagtgtttgcttcattcgtgcgatacacttttgatacatctacaccaatacttgatatcgtttcaataatgctatctccaaatgcatcattacctaattgtgtaatcatatgcgcttgttgtcctaacttttgaactgtacaagctacattgcatggcgcgccaccaatttgcttcgtaaatgtttgaacatcttttaaattcgcatttgtaatatttggaataaaatcaattaacgcttctcctattgaaaataaacgtctcatttatgttcatcctttaaatcatatttagtaaattgtaaatatacttgccctgattctgttgatgttttaatacctagtgcgtcttctgtcgggaaaattcgagatgtcaaaacacgttccccatcattacagaaaatttctatactagatgtatcaacaaaaatttgtaattgctttaatggcgtttctaatatcgtactacgcgtcgtaccttcaacatttgtaggcaataaaccactgtcgctgcgatctaatgttattttattttcacgcttgttataagcgattaatgttgaagaagtcttagacgtacgtaattcaaagtatacttcggtagcatcattatccaaaatatctatgattaattcatactgtttaccttcatacggatgtaattttcgagtaaatttatttgcgtagcctaatgctgtctctttattgtgacgtaatttttccaacgctggatatggacgttgcttaagttgaccattttctacatttaatacacgaggaattgttaagcaatgggcccatccttcattatctgtaggatattcgatttccggtaaccccatccatccaattagtactcgtcggcctttttcatctaaaaatgtttgaggtgcatagaaatcaaaaccattatcaagctcgacaaaattttcatgttcatatgttaacttttcaatatcaaactttccaagtatataaccactttgataaatattgttgaactgatcgcattttggttcaataccttgtggacaaataagtatgacatcttgattatctacattaaagtaatcagggcattcccacatatatccaaaatcatctaactctgtatttatttcacctaaataatgccaattaattatatcttcagtattataaagtaataatcgaccttgctgatcattattttgtgcgccaatgatcgcataatatttctcaccatatttaaaaactttaggatctctaaaatgactcgtatatccttctggttgctggctaattactggctttggaaacttttcaactgaaccgtcttctttcaatcgtgcgatcatctgactcgcatggcgttgccaatgattatctcgatgatttcctgtgtacatataatataaatgcccgttatattcaaaagcgctaccgctatatacaccatggctgtcatatttggtatctgggtttaaaattggcccttcagctttaaagtttattaagtcatcactcgtgtagttataccaatactttaagccatgtactgcgcctaatgggaaccattgatgtgaaacataatactttcctttataaaaaataagtccgttgggatcgtttaataagcccgtttctggttgtatatgaaattgttgacgaaattttgattgatcaacttgttgttttaatgttttaaaataatcagtatcaacgtcctcgattcgttgataacgttcttctctagtccattcggtcataatattcacccagtcctccttttataatttatgctgttaacaatttatattctattatagcaaattttacctacgttctttaacttttaacctatccatttatacttttatggtatcggttccacatttattttaaaaaatacagcgtctaaatattaacatctactgtgacgctatatggcatatcttgctttttaagcatctgttgtatctcttccatcgcgcattgaccagcttcaaaataattataatgaattgtttttatcgatggagacactaattgtgtcattggatcaccaccaaaaccatatatttgatgtggtttcataacatcttttttatcagaataatatttataggcagctaatgcaatcgtatcagttgctccaacaaccgcatctacttgctctacattttccaaaacatttgcaacatctttttgtgcttccacataagtaaaatttgtttcatgtatattaggtttaatttgatatttggctaactggtcaagtaaaccacgttttctatgtataccaactgcaatatctttttcactcacactaaacacttcaacttgttgatatccctgttgaccaatccattcacctataatttgacctgctttataatcatcatgcacaatactatgcagttgttcatgttgttgaccaacaataacgattggtacattcattttattaatgacttcaatatgtctctctgttatgtctgtagccattaaaacaataccatctactttactgcgtgctaatgtttcaagcgcttgtatttctgcttcgatatttaaacctgtataatttaaaattaattgtgattcatatttttggcattgttttgccaatcctttgattgtttcatctactgcatatgaattcattctaggtataatggcaccaataaggtgtgtttgtctcgctcttaagctttgagcaaattgattcggttgatagtcatgttctgctataatttttgttaatttttcacttgtttttttactgacagatccattatttaaaaatctagatactgtactttttgaaacgcctgccaatttggcaatatcagatatatttttcatacttattcacctatcattatttgtgacacttagccttattttagcatatgtgtaaccgctttaaataatatttctgcttctttcataaaaagatttcaaaataaaatttctgtataacaaaatgtcccaacatcaacctttagttaaatgtcaggacaatgaatattctatgtatatataaatctaatatcgaatatgtttattgaatctatttaactcaccttcaaagtaagcatgttcaccatgaacaatcttgtctaaccctatattcgtttcttgttctgtaacagataatggtgtaattaatttaattactttcgcaataataaacgtcatgacgatgctaaaaattacaactgctgttacacataatatttgcacaagtataatatgcacgtcaccagtgtaaataaaaccattctcaatatctggatttgcttttttactttggaaaaaggctgttaatactgcaccaataataccgccaacaccgtggataccaaatgcatctaatgcatcatgatactttaattttacctttatgtaattgatgacaatataacaacagataccccctattaaagccatgattgttgcactaagatatgttacatatccagctgcaggtgtaataacaactaatcctgctaatgcaccgagtaaaagtccaagtaaacttgtcgtctttttaaaaatatattctaaaattaaccaaccaatagccccggcactggcagaaataactgtattcgtaaatgcaagcattgcaatttgatcaaatgtaaaagcactgcctacattaaatccataccaaccaatccacacgaatataccgccaatcaatgtaatgataagattatgtggtgttgattcagaatgtttgtttccttttccaatcattatagctaatactaaaccagaaacacctgatgtaatatgaacgactgtacctccagcgaaatctaatacaccgagtttgttaatccaaccgccgccccaaacccaatgtgctactggactgtatacaagagcagtccatattactacaaataataaataaggaataaacttcattttctcagcgattgaacctgataatattgagattgcaatcgtacaaaacatcatttggaataacataaataatgccaatggaatatgcggactaatatcttcttgtgtcgcgaaacctacatgattaagaaatgtatattcccagttaccaaaccataaattcccttccccaaaactaattgtaaaacctactgttatccatacaaatgtaacaagcacaattgctgccatactttgcatgacagtatttagcgcatttttagattgaactaacccaccataaaataaacttaatcctggtgtcattagccaaactaataatgtacacaaaaacataaatatcgtatcgttaagattcatacttaccactcccttgttttcataataatctgataatttataaaaagcaaaaatgcgtaaagttttattacatcttttggaacaaaatgtgccacgctatataaaaaatgatttcatgaactaaaacaaaaaagactacttactcgcttttaaagtagcggaagtagccatagaatctaatatcaattttattattaaaatgataacgttaaactttttgaactgtaattgtccatgaagcattatcaatttgttcatagtttgttacaggatatccattttctgcagcccaatttggaatagcttccgtcgcttgtgtgcaatcaaaatcaatttttaattcatctccagattgcaatgttgccattttcttttgcgcttcaattaacggaaatggacataccattcctactgtacctaattcgtgtatcatagctatttctccttttccaatcacttttatttgatcaacatcattggcataataaccttctatactatttgcgtttgctgttggacctttgcagattgttgttgtacttttttcattggacgaacaaagataaaatgactcattgtccataccccaactatcatcgatgctagcgcaatccatccttgccaagtcatcgttgccgtttcaaccaaaccgttaccgatagaacaaccaccagcaactgacgcaccaaatcccatacatataccaccaatagcactgtttcgtattgtaatcttgtctggcaatcgccatttaaattctcttgctcctctagctgcaatatatgaaccaatgaaaattcctagaactaaaaagacaccccaatcaataaatttagtttcacctgtaatcaaaaagtgtactaaatttgctgatggcgttgttatacctaaaccgtcatttcttccagttgatgcactcattggccaagctaagagtgcgataagtccaattgcaattgctgcaataaatggatggtatcgtttttcgaaaaggtaatatctaatacctgtataacgttgctttagttttggaacagcaactcgaactttcttattattgagcgttcttacaacgagaaaaatggtgattatagttaatataacgactaatccccaaaacggaatgcccgttgtttgagacatatcactatttacattcgttggttgattaattttatccattactggctttaaaatccctgttttagtgattgctgcagtaacagcatataatactaatgcaatccaactaccaattagcccttcaccagcgcgataccaagtacctgttgcacatcctccagccaatactattccaattccaaaaataaaagaacctataactgttcccaatattggaaaactatgtgcaggaatttgtaaaatacctgttgtcgtcaaaatcaataatcctatactttgaacagtaatagcgattaataatgcatagaacatcttattattcttttgcacatacatatctcgaaagccacctgttaaacaaaatcttgttctttgcatcacaaaacctaagagtcccccgacaattaagccactaaaaatcatccacataatcctaacccccctaatttccgataagtttagtatgtattataggcgatgattttcttgttttcaaccttatacacaatatttttgatatttatattatgttcatataagaaatgcgattaattacgattcatcattatatctctacgtgttaatttattaacctatattatatttatcaacacaacagttttccctttcattttcaaacataacagaaaaagcctgagacatacttagtcccagactgttctataattaattaaagatataacaaggttaatcattcaaagctaacatcacatttattcactgtaatttttcataaagaataataatgactgtaattctatacctaagtcaatttgatgtacttgcacatctgaaggcgtatttattctaccaggagtgaagtttaaaatacctttcacaccagcttggacgagttcatctgcaactttctgtgcaactctttctggtgtagttagaatcacaacatctatttcttccttcttcaatgttgttattaattcatcgttatcttttacaataacgttccctattttctggccaataacatcttcttttacgtcaaacgcttctgtaatcgtcatatcgtcatgtattgaaaagttatatgtgagcaaagctttccctaggttcccaactccgacaattgcgattttgatcatgtcactctcgcttagttcagatttaaagaaatccaataaactatctatattatatccgtacccttttttacctaattcgccaaaatatgaaaagtcacgacgaattgttgccgagtcaatttgtaacgcatcgctaatcgcttttgaatttacacgatctatacctttagattttaatgaactgacaaatctataatataacggcaaacgttttaaagttgctcgaggaattttaacttggtcactcattcgctatttcctccttcgtgtttgaatgaattatatctatgtattcaaacgagttagagcgtaattgttagattattaaaaaacaaataattgattacaatgaatacctaaatattatacattattgaattttaaaaataaatatcttagtttcaagacggcgttttatactgtaaaatggttattaatgtaataattacgacttttatcataagttaataaaatttgcgaaagacgaaaggtgaagatcgaatgatacttttacaactcaatcatatatcaaaatcgttcgatggtgaagatatatttaatgatgttgattttgaagtaaaaactggtgaacgaattggtatcgtaggaagaaatggcgccggtaaatcaacattgatgaaaattatagctggcgtagaaaactatgattctggaaatttgtcaaaaattaaaaacttaaaactaggttatttaactcaacaaatgactttaaattctaatgcaacagttttcgaagaaatgtcaaaaccatttgaacatattaaacgaatggaaagcttaatcaaagaagaaacagattggttatcaaaacatgcaaatgattacgatagtgatacatataaaacacatatgtcccgttatgaatctttatcgaatcaatttgaacaattagaaggatatcaatatgaaagtaaaattaaaacagtacttcacgggttgaattttagtgaagaagatttcaataaacctatcaatgattttagcggtggccaaaaaacacgtttatctttagctcaaatgctattaaatgaacctgatttattacttttagatgaacctactaaccacttagatttagaaacgacaaagtggcttgaagattatctacgttattttaaaggtgcaatagtcatcatcagccatgatcgttactttttagataaaatagttactcaaatttatgatgtggctttaggtgatgtcaaacgctatgttggtaattacgaggaatttatacagcaacgggatttatattatcaaaaacgaatgcaagaatatgaaagtcaacaagcagaaataaaacgattagaaacttttgttgagaaaaatattacccgtgcttcaacaagcggaatggcaaaaagtagacgtaagattttagaaaaaatggaacgcattgataaaccaatgttagatgccaaaagtgcaaatattcaatttggctttgaccggaatacaggtaatgacgtcatgcatgtaaaaaatttagaaatcggttatcaaactgcaattaccaaacctatcagtatagaggtctctaaaggcgatcatatagcaatcattgggccaaatggtattggaaaatcgaccttaattaaaactattgcaaatcaacaaaaagcgcttaatggcgatattacttttggcgcaaatttacaaattggttattatgatcaaaagcaagcagaatttaaatctagtaaaacaattttagattatgtgtgggatcaatatccgttaatgaatgaaaaagatattcgtgcagttcttggacgtttcttatttgtacaagacgatgttaaaaagataattaatgatttatctggtggtgaaaaagcacgtttacaactagcactacttatgttgcaacgtgacaatgtacttattttagatgaacctaccaaccacctcgatatagattcaaaagaaatgttagagcatgcactccaacattttgaaggaacaatactatttgtttcccatgatcgttactttattaaccaattagcaaacaaggtatttgatttaacaattgatggcggaaagatgtatttaggagattatcaatattacattgaaaaagttgaggaagcggaagcgttgaaagcgcaccaagaagaacagtcagttaacgtacaagcacatgaaaagtccatggaacaatcgtcgtatcataaccaaaaagaacaaagacgtgaacaacgcaaacttgaacgacaaatatccgagtgtgaaaatgaaatagaaactttagagactactatcttacaaatagacgagcaattaacccaaccagaagtttataacaatccacaaaaagcaaacgaattagctatccaaaaacaagatagcgaacaaaaattagaacacgctatgtctaaatgggaagaattacaacaaaaactataaaaatatacataactctaactgtaaaatcgctatagttagagttatttttttacaaattttaaatttttttattcacaataaaaacgctgatattatagctatccacagagttatcctagttatccacaagtaaattaacactaatcaatcatttattttctgttttcccacctgatatccacaataaatgacgttatcaacaccttttatccacaagttatacactctttgttgataagtacgcatgttctctattgacattgtttttatcaaaatccattgttaagacattttctttatgaaataataataataatattattgaagaatatttttattattattaaaaataaataaggagatagttatgagcacaaatcaaacatttttaatatttgttatagcaattattatacttacatcggtaataggaattgttggacgatacatgagtcgtcaacgtctattaaaatctatggaaacattatggcaaacgatttctccattagagtcttttatcagaccgaactcacatttcgactatgagtataagctctacaaggataaatttgaatcacattctttagttgatgataaaacttggtccgatttaaatatgaatgcaatctttcataagatgaattataatttaacagctattggcgaaatgaaactatatgcctgtttacgtggaatgctttcaattacgaacaaatcattacttagtttatttaatgataatgctgaatttagaaaaaacgtaacatatcatttagctttgattggtaaaactgtttatccaacatttccagaccaaattacaccggtaaaacgtcataatatattgtttctatgcccgtttttaccagttatctcatttgcagttatatttattaattcacaagttggtattttattatttcttatgagttgcctatttaatatcattttatctgcaactttaaagcgtacatatgaggatgacttaaagtctatattttatgcatccaatgttttaaaacaaggctatactatctcaaaaattaaacatgctccacaacccgaagtcaattttaagcaatttagaacagcacgtcatttaacgagtgttttagctgaagttaatgatgaagatatcggagctatggtaattaaactagttaaacttattttcatgcttgattatgttttattccattcaattcaaaaaagctatacaacacatataaatgagctaaaaaattgtttcgattacatagctgaattagataatcattatgcattagcaatgtatcgtagaacgctagaatgctataccgaaccacaaattgatgattcaaatgatggcatagtattctccgagttaacacatccactcatagcagatgcagtagccaatgatttctcactatcacaaaatatactgttaactggatctaatgcttcgggtaaatcaacatttatgaaatccatagcaataaacatcattcttgcatcggctatacaaacagttaccgcaagcaaatttgtatatcaacctggaattgtgttcacgtcaatggcaaatgccgatgatgtgttatcaggcgatagttattttatggctgaattaaaatctattaagcgtattgttgaaattcctgataatcaaaaaatatactgctttatcgatgaaatttttaaaggtaccaacacaactgaacgaattgccgcttcagaatcagtactatcatttttacatgaaaaatctaactttagagttattgcagcaacacatgatattgagttagctgaactcttaaaacaacgttatgaaaattatcatttcaatgaggtaatagaaaataataacatacattttgattacaaaattaagcctggcaaagcaaatacacgtaatgccatcgaattattaaaaatcacttcatttccagcaaaaatatatgaacgagcaaaagataatgtttccaatggttagcatgaatcttgaacatcaatcaatgttcaagtcgcaacattgttatattggcagtctttgaccaaatgaaaatgcgcttgtaacaagttttttcaatactagtccgcggccccaacacagaagctggcggaaagtcagctttcaatcgtgtacaagttggcggggccccaacataataaatcattagtggttctttatcttttctgtctcactcccctaattgcaatataaaaacgtcagctatcacatgacagaagacaatgaacagtttcaataatattcatcgtaatcatgttaataactgacgtttattttattctgcagaatactcttctaaatctatattgctgtgcccatttaatgctaaatcagcaaatcgaccttgctgatacaaatagtggccggcaacgcctatcattgcagcattatctgtgcataatttaggacttgggatagttaattgaatgtcattgactttgcattgatccgctaaagattgacgtaatcctttattactcgccacgccaccagcaacaattaatcgctgaacaccatattctttacaagcttgaatagctttaaacgtgagaacctctacaacactgttttgaaagctcgttgctacgttagcttcaatgattggaatatttttttgtcgttgattgtgaagttgattgattacggcacttttcaacccactaaaactaaaatcataactatctttatccaaccaaacacgagggaatgaataagtatcttcaccttcagcagccaaccggtcaacttgtggaccacctggataatttaaaccaattgttcgtgccactttatcataagcctcacctactgcgtcatctcgtgtttcaccaatgacttcaaatgttaaatgatctttcatataaactaattcagtatgtccacctgaaacaataagtgcaattagcgggaatgttaatggctcttctatgtgattagcatatatatgtcctgcaatatgatgaacaggaataagcggcttatcgtaagcaaatgccaatgctttggctgcattaacacctattagtaacgcaccaattagtccagggccttctgtaaccgctatggcatcaatatcttccattgatacgtcggcatccactagagcctcgtttattgttgttgttataccttcaacgtgatgtctacttgccacttcgggaacgacaccgccaaatcgtttatgactttcaatctgacttaaaactgtatttgataaaatatctctgccattttttataacactaacgcttgtttcatcacaacttgtttcaacagctagtattaatatatctttagtcatttaaattcacccacataaccattgcgtcctcaccttcaccataataatttttacgtttaccaccatattgaaatcctaaattttcatatacatgttgtgccactttattattaactcttacttctaaactcatcacatcacaagtgtgacttgcatagtttattccgtattttaaaagcatttgacctaaaccatatcctctataattatcatcgattgcaactgtcgtaatttgagcttgatcgataacaatccataaacctaaataaccaataatttgttgttcaaattctaagacaaaatatttcgcaaagttattttgctctatttcatgataaaatgcgtcaattgtccaagaactatcattgaaactccgacgctcaatatcaaagacttgtggcacatcttctttggtcatctctctaatgtttaattgttcttttgactgttgatccaatttcgttccgcctcagctaatttatggtatttaggagtaaatgtatgtacgtctgaaggtttatctatcaattgatacatgactgatgcatttggtagctgcgcaatcacatcaccttgtaaatcatcttgtaattttactgtatctttcccaatataaataaatggttggtttaaatcttctaaaaaagctcgcaatgcatctatcgacatatattgatcttctaaaatagtcactaattgaccattttgccattggaatatgcctgtataaactgcttgtcgtcttgcatcaaacacaggaaccaataatttatcagtatgatcgattgttgctgccaatgcctttaatgatgaaacaccatataatttaacatctaacgcatacgctaatgttttagcaacagtaacaccgatacgtaagccagtatatgaaccaggaccttcagcaacaataatcgcatctaattgctgtttagctattttgctctgctcaaatagctgactaatcgcaggcattaattgcactgaatgattttgtttagaatccgtagttatttcagctaaaacttcatcgttttgcatcaatgctactgataatggttgattcgatgtatcaatgagcagcgaattcatggataattgcctccttaatttgttcataatgttctccttgcgcgaacaactcaatttgtcttgaattttcagatattgttgaaatgttaatagataaatgcgtcgctgggagtaaatcttttataaattgactccattcaataacagtaattgcctgatcttcgaaaaattcatcaaaccctaaatcttcatcagaatcttctaagcgataacaatccatatgatgcaattttaaattttttcccctatatgatttgatgatgttaaatgtcggggaattaatcgtacgtcttacaccaagagcttttcctataaattgtgttaacgttgttttacctgctcctaaatctccgttaagtaaaatcaaatcaccacttttcaattgctcaactaaaaacatagcaaattgattcatttcatctaaattatttatctttatcaatgttgattctcctatattatgcttttcattcataaaaatgattatccattgttcaatcgtatctaactttatatttaacctttatattgtaacaaatttcaacttaaatttcttatctttgaaacagattatctcttcaaagttaattgtaagaaaatttaaaatatttgttgacatactaaagcagatatagtaaattaaatttatcaaatttttagacaattctaactattaaagtgatatataccattcacggaaggagtataataaaatgcttaatcaatatactgaacatcaaccgacaacttcaaatattattattttattatactctttaggactcgaacgttagtaaatatttactaaacgctttaagtcctatttctgtttgaatgggacttgtaaacgtcccaataatattgggacgtttttttatgttttatctttcaattacttatttttattactataaaacatgattaatcattaaaatttacgggggaatttactatgcgaagcgacatgatcaaaaaaggagatcaccaagcaccagcaagaagtcttttacatgccacgggcgcgcttaaaagtccaactgatatgaacaaaccatttgtagctatttgtaactcttatattgatatcgttccaggacatgttcatttaagagagcttgcagatatagctaaagaagcaattagagaagccggtgccattccatttgaattcaatacaattggtgttgatgatggaatagctatgggacatatcggaatgcgatattctctaccatcacgtgaaattattgcagatgcagctgaaactgtaattaacgctcattggtttgacggcgtattttacattcctaattgtgacaagattacacccggtatgattttagcagccatgaggacaaacgtaccagctatcttttgctctggtggaccaatgaaagctggcttatctgcacatggtaaagcattaacactttcatcaatgtttgaagcagtcggcgcttttaaagaaggatcgatttctaaagaagaatttttagatatggaacaaaatgcctgccctacttgtggttcatgtgctgggatgtttactgcaaattcaatgaactgtttgatggaagttttaggtctagcattaccatacaacggtactgcacttgcagtcagtgatcagcgacgcgaaatgattcgccaagcagcttttaaattagttgaaaatattaaaaatgatttaaaaccacgtgatatcgttactcgcgaagcaattgatgatgcatttgcacttgatatggctatgggtggttcaacaaacacggtactgcatacgttagccattgccaatgaagctggtattgattatgacttagagcgcattaatgctattgccaaacgcacgccatatttatcaaaaatagcacctagttcatcgtattcaatgcatgatgtgcatgaagctggtggcgtcccagcaattattaatgaattgatgaagaaagatggcacgttacacccagatagaatcacagttactggcaaaacgttacgtgaaaataacgaaggcaaagaaattaagaactttgatgtcattcactctcttgatgcaccatatgatgcacaaggcggtttatctatcttatttggtaatatcgcccctaaaggcgcagttattaaagttggcggcgttgatccatctatcaaaacatttactgggaaagcaatttgtttcaattcgcatgatgaagctgttgaagcaatagacaatcgtaccgttcgtgcaggccacgtcgttgtcattagatatgaaggacctaaaggtggaccaggtatgcctgaaatgttagcacctacttcctctattgttggtcgtggcttaggtaaagatgttgcattaattactgatggtcgtttttccggtgccacaagaggtattgcagttggtcatatttcccctgaagctgcatctggtggaccaattgccttaattgaagatggagatgagattactattgatttaacaaatcgtacattaaaggtaaaccagcctgaagatgttctggcgcgtcgccgagaatctttaacaccatttaaagcgaaagtaaaaacaggttatctagctcgttatactgccctagtaactagcgcaaatacaggtggcgtcatgcaagtccctgagaatttaatttaatttatttttatattggagatggttaaaatgtctaaaactcaacatgaagtaaaccaaaatattgaccctttaaaaatggctgaatcacttgaacctgaacaactaaatgaaaaaactttaaatgacatgcgttcaggatcagaagtgctagtagaagctctacttaaagaaaatgtggattatttattcggttatcctggtggtgccgtactacctttatacgacacattttatgatggtaaaatcaaacatattttagcaagacacgaacaaggtgctgttcatgctgcagaaggttatgcacgtgtatctggtaaaacaggcgtcgttgtagttacaagcggtccaggtgcaactaatgtaatgacaggtattacggatgcacattgcgactctttaccactagttgtattcactggacaagttgctacaccaggcattggtaaagatgcattccaagaagcggatattctatctatgacttcaccaattacaaaacaaaattatcaagtgaaacgtgttgaagatatccctaaaatcgtacacgaagctttccatgtagctaattctggacgcaaaggtcctgtagtgattgattttccaaaagatatgggtgttttagctacaaatgtggatttatgcgacgaaatcaatattccaggttatgaagttgttacagaaccagaaaataaagacattgacactttcatctcacttttaaaagaagcgaaaaagcctgtcgtattagccggcgcaggtattaatcaatcaaaatcaaatcaattattaacacagtttgttaataaacatcaaatcccaacagttactactttactaggtctaggtgctgtaccttatgaggatacactatttttaggtatgggaggtatgcatggttcttatgctagtaacatggcgttaactgagtgtgatttactcattaatttaggtagccgcttcgatgatagattagcaagcaaacctgatgcctttgcacctaacgccaaaattgtacatgtagatattgatccttcagaaatcaataaagttattcatgtagatttaggtattattgcagactgtaaaagatttttagaatgtttaaatgataaaaatgttaagactatagaacacagtgactgggttaaacattgtcaaaataataagcagaaacatccatttaaacttggtgaagaagatcaagtattttgtaagccacaacaaacaatcgaatatatcggcaaaattacaaatggtgaagcaattgttactacagacgtgggacaacatcaaatgtgggcagctcaattttatccatttaaaaatcacggacaatgggttacaagcggtggtttaggaacaatgggattcggtattccttcgtcaattggtgccaaattagctaatcctgataaaacagtcgtatgcttcgtcggtgacggtggtttccaaatgacaaaccaagaaatggcactattacccgaatatggtttagatgtcaaaatcgtactaatcaataatggaacattaggtatggttaaacaatggcaagataagttctttaatcaacgcttctcacactcagtatttaatggtcaacctgattttatgaaaatggcagaagcatatggcgtcaaaggtttcttaatcgataagccagaacaactggaagaacaattagatacagcgtttgcttatcaagggccagctttaattgaggttcgtatttcccctactgaagctgtaaacccaatggttccaagtggcaaatcaaatcatgaaatggagggcttataatgacaagaattcttaaattacaagttgcggatcaagtcagcacgctaaatcgaattacaagtgcttttgttcgcctacaatataatatcgatacattacatgttacacactctgaacaacctgggatttctaacatggaaattcaagtcgatattcaagatgatacatcacttcatattttaattaaaaaattaaaacaacaaattaatgttttaacggttgaatgctacgaccttgttgataacgaagcttaattttaagacaaaggcaatgatgcgctaattagttatagatatatcataggctgctagttaacatctgccactattacaaagctatatttcagaattttctaaaaacaaaacatttaattatttggaggaatttattatgacaacagtttattatgatcaagatgtaaaaacggacgctttacaaggcaaaaaaattgcagtagtaggttatggatcacaaggccacgcgcatgcacaaaacttaaaagacaatggatatgatgtagtcatcggtattcgcccaggtcgctcttttgacaaagctaaagaagatggatttgatgtgttccctgttgcagaagcagttaagcaagctgatgtaattatggtgctattacctgatgaaattcaaggtgatgtatacaaaaacgaaattgaaccaaatttagaaaaacataatgcgcttgcatttgctcatggctttaacattcattttggtgttattcaaccaccagctgatgttgatgtatttttagtagctcctaaaggaccgggtcatttagttagacgtacatttgttgaaggttctgctgtaccatcactatttggtattcaacaagacgcttcaggtcaagcacgtaatattgctttaagttacgcaaaaggtattggtgcaactcgtgcaggtgttattgaaacaacatttaaagaagaaactgagacagatttatttggtgaacaagcagtactttgcggtggtgtatcgaaattaattcaaagtggctttgaaacattagtagaagcaggttatcaaccagaattagcttattttgaagtattacatgaaatgaaattaatcgttgatttgatgtatgaaggcggtatggaaaatgtacgttactcaatttcaaatactgctgaatttggtgactatgtttcaggaccacgtgttatcacaccagatgttaaagaaaatatgaaagctgtattaactgatatccaaaatggtaacttcagtaatcgctttatcgaagacaataaaaatggattcaaagaattttataaattacgcgaagaacaacatggtcatcaaattgaaaaagttggtcgtgaattacgcgaaatgatgccttttataaaatctaaaagcattgaaaaataagatagacctacaatgaggagttgttaaatatgagtagtcatattcaaatttttgatacgacactaagagacggtgaacaaacaccaggagtgaattttacttttgatgaacgcttgcgtattgcattgcaattagaaaaatggggtgtagatgttattgaagctggatttcctgcttcaagtacaggtagctttaaatctgttcaagcaattgcacaaacattaacaacaacggctgtatgtggtttagctagatgtaaaaaatctgacatcgatgctgtatatgaagcaacaaaagatgcagcgaagccggtcgtgcatgtttttatagcaacatcacctattcatcttgaacataaacttaaaatgtctcaagaagacgttttagcatctattaaagaacatgtcacatacgcgaaacaattatttgatgttgttcaattttcacctgaagatgcaacgcgtactgaattaccattcttagtgaaatgtgtacaaactgcagttgacgctggagctacagttattaatattcctgatacagtcggctacagttaccatgatgaatatgcacatattttcaaaaccttaacagaatctgtaacatcttcaaatgaaattatttatagtgctcattgccatgacgatttaggaatggctgtttcaaatagtttagctgcgattgaaggcggtgcgagacgaattgaaggcactgtaaatggtattggtgaacgagcaggtaatgcagcacttgaagaagtcgcgcttgcactatacgttcgaaatgatcattatggtgctcaaactgcccttaatctcgaagaaactaaaaaaacatcggatttaatttcaagatatgcaggtattcgagtgcctagaaataaagcaattgttggccaaaatgcatttagtcatgaatcaggtattcaccaagatggcgtattaaaacatcgtgaaacatatgaaattatgacacctcaacttgttggtgtaagcacgactgaacttccattaggaaaattatctggtaaacacgccttctcagagaagttaaaagcattaggttatgacattgataaagaagcgcaaatagatttatttaaacaattcaaggccattgcggacaaaaagaaatctgtttcagatagagatattcatgcgattattcaaggttctgagcatgagcatcaagcactttataaattggaaacactgcaactacaatatgtctctagcggccttcaaagtgctgttgttgttattaaagataaagagggtcatatttaccaggattcaagtattggtactggttcaatcgtagcaatttacaatgcagttgatcgtattttccaaaaagaaacagaattaattgattatcgtattaattctgtcactgaaggtactgatgcccaagcagaagtacatgtaaatttattgattgaaggtaagactgtcaatggctttggtattgatcatgatattttacaagcctcatgtaaggcatacgtagaagcacatgctaaatttgcagctgaaaatgttgaaaaggtaggtaattaattatgacttataacattgttgccctacctggtgatggaatcggtccagaaattttgaacggatctctatcattgcttgaaattataagtaataaatataattttaattatcaaatagagcaccacgaatttggtggtgcctctattgatacattcggcgagcctttaactgagaaaaccttaaatgcgtgtaaaagagcagatgctattttactgggtgcaatcggtggacctaaatggacagatcctaacaatcgaccagaacaaggattattaaaattacgtaaatcattaaatttatttgcaaatatacgtcccactaccgttgtcaaaggcgctagttctttatcacctttaaaggcagaacgcgttgaaggcacagatttagttatagtccgtgaattgacaagtggtatttattttggagaacctagatattttaataatcacgaggccttagattctcttacttatacaagagaagaaatagaacgcattgttcacgtagcatttaaattggccgcttcaagacgaggaaaactaacatcagttgataaagaaaatgtattagcttctagtaaattgtggcgcaaagtcgtaaatgaagtgagtcaattatatccagaagtaacagtgaatcacttacttgttgatgcttgtagtatgcatttaatcacaaatccaaaacaatttgacgtcatcgtttgcgaaaacttatttggcgatattttaagtgatgaagcttcagtgattcctggttcacttggtttatcaccttctgctagttttagtaacgatggtccaagattgtatgagcctattcatggatcagcaccagatattgcaggtaaaaacgttgccaatccatttggaatgattctatctttagcgatgtgtttacgtgaaagcttaaatcaaccagatgctgcagatgaattagaacaacatatttataacatgatagaacatgggcaaacgacagcagatttaggcggcaaactgaatactactgatattttcgaaattctatctcaaaaattgaatcactaagggggagatgtaaatgggtcaaacattatttgacaaggtgtggaacagacatgtgttatacggaaaattaggcgaaccgcaactattatacattgatttacaccttatacatgaagttacttctcctcaagcatttgaaggacttaggcttcaaaacagaaaattaagacgcccagatttaacatttgcaacactcgatcacaatgttcctactattgatattttcaatattaaagatgaaattgcaaacaaacaaatcacaacattacaaaaaaacgccatagattttggggtgcatatttttgatatgggttctgatgaacaaggtattgttcacatggtgggacctgagacaggacttacacagcctggcaaaacaatcgtttgtggtgactctcacacagcaacacatggagcatttggtgctattgcatttggaattggaacaagtgaagttgaacatgttttcgcaactcaaacgctatggcaaacaaaacccaaaaacttaaaaatcgatattaatggcaccttaccaacaggcgtctatgctaaggacattattctgcatttaattaaaacgtatggtgttgattttggtacaggctatgctttggaatttactggtgaaacaattaaaaacctttcaatggacggtcgaatgactatttgtaacatggctatcgaaggtggtgccaaatacggcataatccaacctgatgatataacatttgaatatgttaaaggtcgaccatttgccgataacttcgctaaatcagttgataagtggcgtgagctatattctgatgacgacgcgatatttgatcgtgtaattgaacttgatgtttcaacattagaaccacaagtgacatggggaactaatcctgaaatgggtgttaatttcagtgaaccattccctgaaatcaatgatatcaacgatcaacgtgcgtatgattatatggggttagagccaggacaaaaagctgaagatatcgacttagggtatgttttcctcggttcatgtacaaatgctagactatcagatttgattgaagctagtcatattgttaaaggaaataaagttcacccaaatattacagctatcgtcgtaccaggttctcgtacagtaaaaaaagaagctgaaaaattaggtctagatactatctttaaaaatgcaggatttgaatggcgtgagccaggatgttcaatgtgtttaggcatgaatcctgaccaagtacctgagggcgtacattgtgcatctacaagtaatcgaaactttgaaggacgacaaggcaaaggtgcaagaacacatttagtatcccctgctatggcagcagcagcagctattcatggtaaatttgtggacgtaagaaaggtggttgtttaaatggcagcaatcaaacctattacaacatataaaggtaaaatagtccctcttttcaacgacaatatcgatacagaccaaatcattcctaaagtacacttaaagcgtatttcaaaaagtggctttggtccatttgcttttgatgaatggcggtacttacctgatggttcagataatcctgatttcaatccaaataagcctcaatataaaggtgcatccatattaattactggagataattttggatgtggttcaagtcgtgaacatgcagcttgggcacttaaggactatggctttcatattataattgcaggaagtttcagtgacattttttatatgaattgtacaaaaaatgcaatgttaccaattgttttagaaaaaaatgcacgtgaacatcttgctaaatatgttgaaattgaggtcgatttaccaaatcaaactgtgtcatcaccagacaagagtttccattttgaaattgatgaaacttggaagaataaacttgtaaatggcttagatgacattgcaatcaccctacaatatgaatcattaatagaaaaatatgaaaaatcactttaagggagttgaatattatgacagtcaaaacaacagtttctacgaaagatatcgatgaagcatttttaagacttaaagatattgtcaaagaaacacctttacaattagaccattacttatctcaaaagtatgattgtaaagtttatttaaaacgagaagatttacaatgggtacgttcttttaaattaagaggtgcttacaatgctatttctgttttatcagatgaagctaaaagtaaaggtattacatgtgcgagtgcaggtaatcatgctcaaggtgttgcctatacagctaaaaaacttaatttaaacgctgttatctttatgccagtcactacacctttacaaaaggtaaatcaagtaaaattctttggaaatagtaacgttgaagttgtactaactggtgatacatttgatcactgtttagctgaagctttaacttatacaagtgaacatcaaatgaactttatagatccattcaataatgttcatacaatttctggacaaggtacgcttgctaaagaaatgctagaacaagcaaagtctgacaatgttaactttgattatctatttgccgcaattggtggtggtggtttaatttcaggtattagtacctattttaaatcctattctcccaacacaaaaattatcggagttgaaccttcaggtgctagtagtatgtacgaatctgttgtcgtaaataatcaagttatcacattacctaatatcgataaatttgtcgatggagcttctgtagccagagttggcgatattacttttgaaattgccaaaaaaaatgtagataactacgtacaagtagatgaaggtgctgtatgttcaacaattttggatatgtattcaaaacaagcaatagtagcagaacccgctggcgctttaagtgtaagtgcgcttgaaaactataaagatcatattaaaggtaaaacagtggtttgtgtcattagtggtggtaataatgatattaatcgaatgaaagaaattgaagaacgttcattactatatgaagaaatgaagcattactttatcttaaatttccctcaacgtccaggtgcattgagagaatttgtaaatgacgtattaggacctcaagacgatattactaaatttgaatacttaaaaaaatcttctcaaaatacaggtactgtcattattggtattcaacttaaagatcatgatgatttaatacaactcaaacaacgtgtaaatcatttcgatccttccaatatttatattaatgaaaataagatgttatattcattgttaatttaacacatattaagaaaagcagtcataaattgatttctaattgaaatcatcttatgactgctttttattatgctttacattattgaggttgcacgctttgtataccatcgtatatttctttgagcctaaagtcttcttcattccccaccccattatttatattttgaatggcagttgaaattactttgtcataaatagccttctcactttctggtaaattatgtcgtggtatactcatcaaagcatatgctttttgtttatcttcaatattttctatacgattcttattattattaaaattctcattagcttcactaccattattattaatattatgcgtgttttctttttcatgtttgttttcttgcatatgattcgggatttctgacttattttcagcatctgtaggaaaatatattttataagcaaaaaatccacacacaatcaatgagcatacaaataaaaaagttaacatcgtaccaataaatattttcaaatccgttctcctttcaaccattcattcttacatgtatatttagtattaaaaaatccttatagtctcaacttgcctggcaacgttctactctagcggaacgtaagttggctaccatcgtcgctaagaacctttcttgacttgtgacaatcgcttgcttctttcctcttcttcggctctcgcttactcatttagctctactaaactcgttgcgctcttttctcgtttcgtcagattcaaacgttttcacttcgccaagccatttttctttgtgctaactttttattttgacattttagacataaaaaaaagagaccttgcggtctcaatgtgaaatgctcccttcaaagtagacattgaaaaaatgaaaactttgaagggagctttatttatgtcaataaaacctaaagtagacatagatgtactgctatatatgtttcaagaatatgaaaaaggcgtgtcgtttcaatacttaatcgatacattacaattagatattaatgtcaatactttgtatcctaagtataaatattataaaacccatggtattgaaacactacttacacaaaaacaatacaatcactattcaaaggaactaaaattaaaagttgtaaatgaatatttgaattcaaatcaatcaacccaagacatcgcaatcaaatacaatattcgtagttcgacacaagtcaaaaattggataaaaatgtatactgtaggaaaagagattaagaatcaatctcctaaaactggggtgtatatcatgaaagcaagaaaaaccacatttgaagaacgtgtaacaattgttgaatattacttgaatcataaacaatcttatagagaagttgcagaacactttaatatctcatacggtcaaatttaccagtgggttcataagtatcaagcacatggtaaaaatggattagtagatggcagaggcaaaggaaaacccaaatctatgatgacgccagaagaacaaaaagaagctgaaattcaagcattaaaagcacaaaatcgattattagagatggaaaatgacgttttaaaaaagtttcaagcattggaaagagagatgattcaaagagaaaacaaatcacggcatacaaaacgatcgaagcgttaaaacatcaataccctatccaacgcttgtgtcgtattttaggcatttctagagcgagttattataagtgggtacattatcaatcgagtgaacttgaattagagaatgaacagcttaagcgagaaatagaatcaatctatcataagtataatggtatttatggctatcgtcgcatttatatctatattcgcttaaaactaggtaaacaagtaaaccgaaagcgaatttatcgtttgatgaaagaacttaatttaaaagcagtaatacgtcaaaagcgaaaaccttatcgacgttcaacgccacaaatcacatcagaaaataagcttaatcgacaatttgacattgatacgccaaataaagtttggttaacagatgtaacagaatttaaaatcaaagaaggtagtaagatatatttgagtgccatttatgacttaggtgctaaacgtattgttagttatgagctaggcccttctaacaataatcaattagtatttaaaacattcaatcaagcgatagaaaaagtagaaaataccaaaggtattttatttcatagtgaccgaggttttcaatatacatcgaaaacatttaaacatatgttggatgaatgtggcatgattcaaagtatgtcacgtgttagcaaatgtatcgataacggtccaatggaaggtgtatggggtacaataaaaagtgaaatttttagaggaaataagcactttaaatttaatagtgtagaagaagctacaaaaacaattcatgattttattcttttctttaatcatgaaagaattacattaaaaatggctgattctgtataacaacaaaaccaaccattaattttaattatttaattgtctactagactgggtgcagttcaatgcggctcatcgcatccatttttttgcctggcaacgttctactctagcggaacgtaagttcgactaccatcgacgctaaggagcttaacttctgtgttcggcatgggaacaggtgtgacctccttgctatagtcaccagacatatgaatgtagattatacattcaaaactagatagtaagtaaaagtgattttgcttcgcaaaacatttattttgattaagtcttcgatcgattagtattcgtcagctccacatgtcaccatgcttccacctcgaacctattaacctcatcatctttgagggatcttataaccgaagttgggaaatctcatcttgaggggggcttcatgcttagatgctttcagcacttatcccgtccacacatagctacccagctatgccgttggcacgacaactggtacaccagaggtatgtccatcccggtcctctcgtactaaggacagctcctctcaaatttcctacgcccacgacggatagggaccgaactgtctcacgacgttctgaacccagctcgcgtaccgctttaatgggcgaacagcccaacccttgggaccgactacagccccaggatgcgatgagccgacatcgaggtgccaaacctccccgtcgatgtgaactcttgggggagataagcctgttatccccggggtagcttttatccgttgagcgatggcccttccatgcggaaccaccggatcactaagtccgtctttcgaccctgctcgacttgtaggtctcgcagtcaagctcccttatgcctttacactctatgaatgatttccaaccattctgagggaacctttgagcgcctccgttaccttttaggaggcgaccgccccagtcaaactgcccgcctgacactgtctcccaccacgataagtggtgcgggttagaaagccaacacagctagggtagtatcccaccagcgcctccacgtaagctagcgctcacgtttcaaaggctcctacctatcctgtacaagctgtgccgaatttcaatatcaggctacagtaaagctccacggggtctttccgtcctgtcgcgggtaacctgcatcttcacaggtactatgatttcaccgagtctctcgttgagacagtgcccaaatcgttacgcctttcgtgcgggtcggaacttacccgacaaggaatttcgctaccttaggaccgttatagttacggccgccgtttactggggcttcgattcgtagcttcgcagaagctaaccactcctcttaaccttccagcaccgggcaggcgtcagcccctatacatcaccttacggtttagcagagacctgtgtttttgataaacagtcgcttgggcctattcactgcggctcttctgggcgttaaccctaaagagcaccccttctcccgaagttacggggtcattttgccgagttccttaacgagagttcgctcgctcaccttagaattctcatcttgactacctgtgtcggtttgcggtacgggcacctattttctatctagaggcttttctcggcagtgtgaaatcaacgactcgaagacacaatgtcttctccccatcacagctcagccttaatgagtaccggatttgcctaatactcagccttactgcttagacgtgcaatccaatcgcacgcttcgcctatcctactgcgtccccccatcgattaaaacgattataggtggtacaggaatatcaacctgttatccatcgcctacgcctgtcggcctcagcttaggacccgactaacccagagcggacgagccttcctctggaaaccttagtcaatcggtggacgggattctcacccgtctttcgctactcacaccggcattctcacttctaagcgctccacatgtccttacgatcatgcttcaacgcccttagaacgctctcctaccattgtccaaaggacaatccacagcttcggtaatatgtttagccccggtacattttcggcgcagtgtcactcgactagtgagctattacgcactctttaaatgatggctgcttctaagccaacatcctagttgtctgggcaacgccacatccttttccacttaacatatattttgggaccttagctggtggtctgggctgtttccctttcgaacacggaccttatcacccatgttctgactcccaagttaaattaattggcattcggagtttgtctgaattcggtaacccgagaggggcccctcgtccaaacagtgctctacctccaataatcatcacttgaggctagccctaaagctatttcggagagaaccagctatctccaggttcgattggaatttctccgctaccctcagttcatccgctcacttttcaacgtaagtcggttcggtcctccattcagtgttacctgaacttcaacctgaccaagggtagatcacctggtttcgggtctacgaccaaatactaaacgccctattcagactcgctttcgctacggctccacatttactgcttaaccttgcatcaaatcgtaactcgccggttcattctacaaaaggcacgccatcacccattaacgggctctgactacttgtaagcacacggtttcaggttctatttcactccccttccggggtgcttttcacctttccctcacggtactggttcactatcggtcactagagagtatttagccttaggagatggtcctcccagattccgacggaatttcacgtgctccgtcgtactcaggatccactcaagagagacaacattttcgactacaggattattaccttctttgattcatctttccagatgattcgtctaatgtcgtcctttgtaactccgtatagagtgtcctacaaccccaacaagcaagcttgttggtttgggctcttcccgtttcgctcgccgctactaagggaatcgaattttctttctcttcctccgggtactaagatgtttcagttctccgggtgtgccttctgatatgctatgtattcacatatcgataacatgacataactcatgctgggtttccccattcggaaatctctggatcaaagcttacttacagctccccaaagcatatcgtcgttagtaacgtccttcatcggcttctagtgccaaggcatccaccgtgcgcccttaataacttaatctatgtttccaccatttttataagtcaaacgttaacatacggcttcgttttcattattttaaatactcatttacataagtaaactctgctttaaaataatttaactcattgtctgctaaacgttttattttataaaaagatttaaacacgttattaatcttgtgagtgttctttcgaacactagcgattatttcttatgaattcaagcttatttaaaactctttattcactcggttttgcttggtaaaatctatattttacttacttatctagttttcaatgtacaaataatggtgggcctaagtggactcgaaccaccgacctcacgcttatcaggcgtgcgctctaaccagctgagctataggcccattttttgaatgctaaataaacattcaaaactgaatacaatatgtcacgttattccgcatcttctgaagaagatgttccgaatatatccttagaaaggaggtgatccagccgcaccttccgatacggctaccttgttacgacttcaccccaatcatttgtcccaccttcgacggctagctcctaaaaggttactccaccggcttcgggtgttacaaactctcgtggtgtgacgggcggtgtgtacaagacccgggaacgtattcaccgtagcatgctgatctacgattactagcgattccagcttcatgtagtcgagttgcagactacaatccgaactgagaacaactttatgggatttgcttgacctcgcggtttcgctgccctttgtattgtccattgtagcacgtgtgtagcccaaatcataaggggcatgatgatttgacgtcatccccaccttcctccggtttgtcaccggcagtcaacttagagtgcccaacttaatgatggcaactaagcttaagggttgcgctcgttgcgggacttaacccaacatctcacgacacgagctgacgacaaccatgcaccacctgtcactttgtcccccgaaggggaaggctctatctctagagttgtcaaaggatgtcaagatttggtaaggttcttcgcgttgcttcgaattaaaccacatgctccaccgcttgtgcgggtccccgtcaattcctttgagtttcaaccttgcggtcgtactccccaggcggagtgcttaatgcgttagctgcagcactaaggggcggaaaccccctaacacttagcactcatcgtttacggcgtggactaccagggtatctaatcctgtttgatccccacgctttcgcacatcagcgtcagttacagaccagaaagtcgccttcgccactggtgttcctccatatctctgcgcatttcaccgctacacatggaattccactttcctcttctgcactcaagttttccagtttccaatgaccctccacggttgagccgtgggctttcacatcagacttaaaaaaccgcctacgcgcgctttacgcccaataattccggataacgcttgccacctacgtattaccgcggctgctggcacgtagttagccgtggctttctgattaggtaccgtcaagatgtgcacagttacttacacatatgttcttccctaataacagagttttacgatccgaagaccttcatcactcacgcggcgttgctccgtcaggctttcgcccattgcggaagattccctactgctgcctcccgtaggagtctggaccgtgtctcagttccagtgtggccgatcaccctctcaggtcggctatgcatcgttgccttggtaagccgttaccttaccaactagctaatgcagcgcggatccatctataagtgacagcaagaccgtctttcacttttgaaccatgcggttcaaaatattatccggtattagctccggtttcccgaagttatcccagtcttataggtaggttatccacgtgttactcacccgtccgccgctaacatcagagaagcaagcttctcgtccgttcgctcgacttgcatgtattaggcacgccgccagcgttcatcctgagccaggatcaaactctccataaaaattatgatgtttgattagctcataaatactaaataatgtttgtaacttatagttacgttttttggaattaacgttgacatattgtcattcagttttcaatgttcattaaaattatttatggagcgggtgatgggaatcgaacccacaacatcagcttggaaggctgaggttttgccattaaactacacccgcttatttaattaagaattttgatgcggccgagaggacttgaacctccacgggatttctcccactaggccctcaacctagcgcgtctgccattccgccacgaccgcggatataggcatttaaaacatcttcgtttttcagaacgttatttattatattatgattaaaaatatttgtcaataacttttaatcgtttttttacattaaattaatttgtgttatcagttgttaacacaacgttatttataataaaacattaagaacttattgtcaacatattttataaattaaatttagaattgactgtctttcaaatcaaagtttatttaatttgttcttttttaaggaacgtgtttaatcatactaactataagctgtacagtcaatagataaattcaatcaaaatgtcattaaaaatgtataattatcttttgtgccactttaaagctttaattgggtaaagtttatatataattcattactaaaatacgccaagatttttaatctaatctatttaatttcatcctatcaagtcacaatttatgccattacctatattaaaagtagaaaagccgcgattgcgaagtattaaattacgacaatctcggctttaaacattttataaacacaatttcttcttattcaattactatgtttaccaatcaaaataactcactgataaattctatataaattccatacaactcataaataatcttacatatacatgaattagctctatttgtattgtacttatttcaattgtcttttcattcttaattttccattgcaatgtccgcaacgcatacgattcgtatcaactttacggatacgtatatattttgcatgacatttagtgcaataatattcataatttgcccgttgttgatagctttcaatgctgttacaaaatctaggcgctccaacctgttggctcaatcgtttaaaatcttgatctttatgttgataacctttaccagcaatatgcaagtgataatgacacagttcatgcagtataatttttacaacagcatcttctccataatgctcatattgttttggattaatttcaatatcatgagactttaaaagataacgtccgcctgttgtacgtaaccttttattaaaatatgcacgatgttgaaaggtacgtccaaatttttcttccgaaaggttctcgaccattcgctgaagtatttcgttattcatgtggatcaatcattgttaatgatactttgtctttatttttatcaatactatgaatccaaacgtctacgatatcaccaacactgacaatatccattgggtttttaacaaatttcttagaaagtttcgaaacatggacaagtccatcttgtttaacacctatatctacaaatgctccaaaatctactacatttctaactgtgccactcaatttcattccttcttttaaatcttcaattgatagcacatcggatttaaggattggtgtttcaaactcgtcccttggatctcgattaggtgctttcaaggatttaataatatcctctaatgtaggtacaccgacttgtaattcaatcgccagttcatccatatccaatgaatttaatttagcttttaatgcatcactacctaaatcattaccaccaaatccgagtttatctaataactgatacgttactttatagctttcgggatgaatcgatgtattatccaatggctctgacccgtctactattcttaaaaatcctatactctgctcaaaagttttagcacccaaacgcttaatcttgcttaactctttattatgctttattgcgccattttcttctctatatgcaattatatttttagcaatttgcgaacttagaccagacacatattgtaataatgatgatgatgctgtattgacatcaacacctacttggttaactgctgtttcaacaacgaaagttaatgcattttctagtgctttttgattaacatcatgctggtattgtccaacaccaatagatttaggatcgattttaactaattcacttaatggatcttgaacgcgtcgtccaattgatacggcacttctttcttccacttgaaaatcaggaaattcatctctagcaatttctgatgctgagtatactgaggcgcccgcttcattgacaatgatgaattgtactggcaactgatgctttttaattaaatctgcaacaaattgttctgtttcacgacttgctgtaccattgccaattgcaattaattgcacatcatacgctttaaccatttgtacaaaatccttctctgctgcttcttttttagcaactggtggatgcggataaatcacaccttttgctataaaagtaccaaatgggttaatgactgctaatttacaacctgttctaaatgcaggatctacgcctaatatttgtttacctttcattggaggttgcagtaatagatttcttaagttttcactaaaaacatctattgcatgattttcagctttttcagttaaatcagcatggatttcacgctctatcgaagggacaattaagcgtttcaagctatctttaatcgcctctaaaatataactgcgatttacattattatgattgatttcttgacgtgcaatgaagtcctctactgctgtcgtatcgaattcaaactttacagataatactttctctttttcgccacgattcacagctaaaactctatgattagcaatgcgtttaattggctcactatatgcatagtacatttcaaaaatacctttttcatcttcagcatttttctttttagatgtagttaacacaccttgatgatacatatcttttaaaatttttgttctatatttaggattatctgaaatttgttcagcaataatatcttgcgcacctctgatagcattttcaaccgattgcacttcttcatttataaattgttgtgctttttcttcaattgatacttcatgtttacgtgccttcatccatatcgctaatggttctaatcctttacgtttcgcctcagtcgccctagtctttttcttttgtttaaaaggtctatataggtcttcaacacgttgtaatttgttctgttttaaaatatctttctttaattcctcagtaagtaatccttgctgttctatatttttgataacttcttctttacgtttttgtaaattgaccatatattggtattcgtcatcaatttgctttatttgaacttcatctagtccaccagtttgctcttttcgatacctcgcaataaatggtactgtatttttttcttcaagcagtgttaacactgcttcaatttgttttttactaaattgatatttctctatgattgaattaatcaattgattgtccatttacttaacccacactttttcttaaatttactcatttattttaacatattctaaaatacttctattaaggtatgatacttaatgcaattttaacttccaaaactttaaaaacgaattattaggtcatactatatcttaaaacgcactaagattattgaaaatgacacaccatcatttcctaaatttcataatctaaacctactttttttattctaatagcaatccacttaattaaactgacaattagatatcttcttcacttaaattattaatactatatcgcgacatttatgtggatacacattaaactacgttaataatgtattaattcgaaaatcttaattaaattaaaaatatccctcgatttcaatttaataatcaagggataattatatggatttttcattataaaacgcattattaataagcaaattctatttatgtgctgcttcttgtaatttcttaattgccgttctttgaagtctggaaacatgcatttgacttaaaccgatacgctcacctgtctctttttgactcaaaccctcaataaacgtacattgtatgatttctcgttcgcgatcagataatataggtaatattttttctaaaatcatacgtttttcagttaagtcataatggtcatcttgttgtcccataatatctaatagcgtaacagttgaaccatctttatcagcttcaatggaatggtcaacacttaacgcattataactttgtcccatttccattgcttctaacacttcttcttctgaaacttctaatcgatcagctatttcactgatagaaggtgaacgctctaattcagcggttagttcatcgctcacttttttgattcttggtccaatttctttaatacgtctcggaacatgtacactccaagttttatctcgtagatatcttttgatttcaccgattacagtaggtactaaaaaggcttcaaacttccgttcaaaggacatatcgaatctatttatggcacctattaaaccaaccataccaacttgaactaaatcttcgtgatgtgattgtcctttagaatatttatatgccaatgactcaattagtttttggtaatgtttaactaacttatcttgtgcatctgtattcttattttcttggtgttctttaatccattggttaatttgctcaggtgaaacttcattagctgatttcgactctttcgccattatttcgcacctgctctttttttatatacttagtcatactgattgtcacaccagattctttatatactgtcacttcatccattaaagattcgattaaaaataaacctaggccaccttcacgtaaaaagtctatattttcatctttatcgtaaggacctatttttgatttagttgtttcataatcaaaactgtcacctttatcagaaataacaattttaattttatcttctaaaatttcaaaatatatgttaataatgcccacattgtttttttctttgtatgcatgtttaactgcatttgtcacagcttcactaactgcaatcttggcatcttcaatatcatcatatgtagcaccagctctcgaaaaaacgccagaaagtgttaaacgaattaaacttacatactctgccgatgctggcacgcgcatttcgataaaatcttctttagattgcatgttattcgacctccgttccttcattaacatgcattaaatccttaagaccagtaatttcaaatagtctaccgatacgatctgacacacctaaaatgtatagctctttatcattttggtttaatgcttttaatgtacctacgaataaacctaaacctgtcgaatccatataactcacattttctaaattaacataaatatcacgagttccatcttgtctcataggtgttaaaacctcttctaattcaggcacagtataaacatctaattctccaccgactttaacttcgtaaaatttatcttgagtggttgtttctatattaagattcatttcattacactcctacttattaaaaatatttatcttcattttaagcgctgtatccaccatatttatatttcaaattattatatacccatcgaaataatttctaatcttcttttttaaattaatttactctttttataatcaaaatagtcatatcatcttttttatttgggttttgaagttttaaaattgcttcatagataatttgaacaatatcttgtgggtgcatatgtttatgttttttaatatattctaaaagtttttgtttatctataaaggtaccttcactatttctagcttcagtcacaccatccgttaaaatgataattaaatcatcaaggtatattggaatttcttgttgttgatatcgtgtttgtgaactgattcctaacactctacctctaactgaaatttcttcaaactcttctttttcagcgcgataaatatatccaggctcatgaccagctgaactacaatataataaatggttcatttcttcatataaaccataaaacattgtgacgaacatattttgattaatattcttttcaacaacacgatttaaacgttttaagccatcactcggtaattgtgagtgtccataagaatccatgccaaactttatcatactcattgctaaagcagctggtataccttttccaatgacatctgcaacagcaaagctcattgtgccatcgttatggtcaattaaattaaaataatctccacttactttttgtgccgccactgaaataacgccaatttgaatactatcaaattgtggaatatctgttttaagcattgtttgttgtaagctagaagctaagtctatctctttatcgtgaacttgaagtttatctaccaatctttgataatctcgataactataaccaaagcctttaacgatttcttgtaagacatctaatgtcttgaacacatcttcacgcgttaagtttaacgtcaatatatagtttttgtgaatatcgacaatgtcttcaggcaagacgtccttacgaatcacttcgtcagtgtatttctcacacttttttatcaattctactttatcttggcacgttaaactttcatcaattaaacccttataatgttgcttaaattcttccacgattagttgcctcctcacttcccttacaaagcaaatgcttaagcaaggataattatgattcacttactaacatttatttaattgcacttatcaattttgtcgtttgcaattttgctgtagatgatacttttaagctaaaaaaaactttaggatggaatacctaaagcctaaaaaacttaagacatccttttataataaaaaatatgaatatcataactggtatttgctaaaatctttgtttataagaaatttcttcgtacagaatttagaaatagttataattattataaagttattgtcttttatatcaatattttatttatctctgaaaaatacatataatagacgcctaatttttctgatgaactactgcattcagccctaaactaatcattagtgcattatctacttctttcattttatcatcggataagtatgtcagtttttctttcaatcgttttttatcaagtgtacgaatttgctctaataatataactgagtctttatccaatttatactttttcttttcaatctctacatgtgtcggtattttcgctttgttaatcctaccagttattgccgcaacaataactgtaggactatatttattaccagtatcattttgaattatgactacaggtctgactcccccttgttcagatccctgtactggtgataaatctgctaaataaacatctcctcgtctaatcattcattcgttgaattagaagataaatatgtttcgttgcaatcgcatgcttcacactctatcggaaaagcttcgttcgctagggagagatttaaatcagccatttgtgaatatccttcttttaaagattgttctaagctatgacttctattttgactaaaagataacatatgagaacctccaattgattccaaaagttattaaatgacctttaattactctaatgataacaaattttatatgcactgaccatattattttaacaattcatttgttacaaaacgttgatcaccatcatgatagattcgcggcaaacgtctcgacaagttacaaagcacttcataattaatagtatgttgcttttcagctgccacctctaccgactgtggactttctctatgattatctattaaaatcaccgaatctccagctttaacttgatctggcacttttacaattgtctgatccatacatacgcgaccaataacttcgcattgatgaccatttacatttacaaagctaccttgcataatgcgtaaatagccatctgcatatccaataggtaacaatgctattgttgttggatcagtagctgtataagttgcaccataacttacagactcacccgcttgtagcgtctttgtttgaactacattagcaattaattgcacacttggtttaaggtgtactttaactttttgctgtacatactctgatggataatatccataaagggaaattcctggtcttattgcattacagaattggcaatccattaatagagaacctgctgagttctgacaatgtatatattcaggtttaattgcttcattgaccatatctttaaaacggtgatattgttcagttgtcatatctcctggttcgtcagcacaggcaaagtgtgtaaacacgccttcaaatacaagttgctcatattgttgaatgatttcaatcacttcttgatacgttttagtatctttaatacctaaacgtcccattcctgtatctaatttaatatgcaaccataactttttctcttgctcaccagaaatgtttttaattgcttctttcaaccactgtttagacggaaccgttaaggcaactcggtgttgtatcgctttatcaatatctttagctggtaacacacctaagactaaaattttagcagtaatcccatgcattctaagttctatcgcttcatctaacgttgctacagcaaaaaatgtggcaccattttccattaaatgacgtgctactttaacactacctagtccataggcattggctttaacgacagccatcactgttttatttggatgcaatgtactgaatactttgaaatttgatgcaacagcgtttaaatctacattcatatacgcagatctataatatttatctgacatattacttcctcctgtaattcccacacgttttaaaactagattttaattatcattgtataacaaatttaaaatgctgacttttctaaaacaacttggctcatcgcataatgctcagtgtgtgagatactaacatgtacgatgaacccttcgtaatcgatctttggtttgccaagttcgtcgttgtaacaatctatatcattaaatgcgacatgttttcctaagcctgtgcctaatgctttactgaacgcttcttttgtagcaaacctgccagctaaaaattcaattttacgttgctcatgtgtgaaattgttgaatttgtgctgttcatttttagttaaaatccgctcaaccaattttggttgcttactatataacacttttattcgatctatttcgattaaatctacaccaattccatgtatcattgattattcctcatttttattgttttctatatgtctctcgttatttaaccagcgtttcaatctacgtgcttcacttctatctattaattcaatttcagcttgaccacccgctgtataaagtgtcaaagttgctaatcgatagcgtctcattataggaccaacatcgatatcaatattttgaatacgaaaatatggtattactttttcatccaaaaataaaatgccgtttcgtacacgcaaatggtgtttttcaaatgcatatctgcagtgcttatatcgatagactggcgctatgacaagcgtgaaaatagcaacaagtaatattataatcacactactaacaatagatatatagttatctaatatctcccaaaatagccagttcaaaatattaaatgctattaaaagtacaaacgctattggtatccaaaacagcacagcacttaacctcatcacttttttagcatgtggtgacataaacttataatcactcaccattttcacctctcaaataccacgacttcaatatttgcacatctttgctacttgcgtattttaagttaatcgattgggctcccacacctttagcaacaataaaactaaaattatttaaattgttgcgtttaagtaatgtatgttgccaagtgtcaaatcctataatgtgttgcgctttaaaataataaatatttcgtttcaatagcacgaaattctggatagtaatttgttcatctgtcattttaaaacccgcatgtttgacataaagatatcctttgattacaaataaaccaataatgactactgttataatcgtaaataacaataataattgattccaaaagtaacagccaattcctgccatagctatgacaataatactaggtattaaaaagtgtctgtggaaacctgacaaaggcataccttcattgacttgctgataagataaatctggtactagattctggataatttgatatgctttgtctcgtttaataaacggcaatatcggcacactacctgaatcattgtcatcatcttcgatttttttattttcaaaatcacttgtgatgataaaatgtattgcagtgtagccaaataatcttcgtatatatgactgacgttcaacaacagcttgcaatcgtttcgttggtacagtcactttcatcttgttaaagagtccatattcaattttaagttgctcattttcaagcatcaccgaaaagccataaaatcttatcatcgttataatcgttccaataatatatgccgctattaatactagtaaaatgataattaatactgaaatacttacaatttgaacccattgactaatttcatgatttagcttcgaccatgggatcaattctcttacagcgccgtaaatcggtactaaagctgctaacgttacaccaatggcgccactggtcattgccataaatagtgattctttaaaattcatctgatatataggaatgcgtttatttttctgatttagcatactatcagtgttctgcacttcatctaagcgaccttctgcgatgtcttccacattaccttcaatgtcatgattacagttgtcattcttctcagtactagacttttgcgccacttctgtcttcaactctgtttgcaattgatcaatatatcgttcaagatattcaccttgctttttcgaaataacacttaagacaataccatcacttggcgttttgatttgtaaatccacgccacctatcatttgattgacgaccccttgagtcatatcaacggactgaatacgttttatatttaattctttacgctttttattaaaaatacctgttgttaaaatgaaataattatcctcaatccaatatcgcgtgttcataattccgacaatttgagaaatgtatgatattaaaaagaatacaaatacaatacctatccataaatatgattcgggattcgtataatcaaaatctttcaattgaaagataacgaaaataaaaaagacgactatgttttgtttgatagcattgattatgccattaaaatatgaaatcggatgtaatttttgaggttcagacatcactttcaacccctctcaaattcgacatagttctcgcttcgattattttaacatcgtcatgagacatcatcggtaaataaatagtatgacctgcagtcataaatccaactttatacaaattaagcactttactaattggattagatttaatcgacaagtattgtaaacgttcaattcgactcgtttcttctttatatattaaaaatgatgtacgatattgtacactgagttgatcaacttgataaaagcgacagtgatattgccataaaggcttaatgattaattttaaaacagtcaaagtacataaaacaaataaaatataaattaagtactgaggccattcaaatcttaaccatataaaataaaaaatgacatacacagctacactcaatataaattctaagccattcgtaatgtagtaatacaacaatgctgacttaggactcttagataacttagtataatctgacatatacccctctccccaaataaaaattatacggatttataatctatttcattttatttttatatgttgataattatagcatatggaatatttcatgctaatttattcttcctaaaggtacatctaaaaatttagttaagcagaaagtacttgaatacctaaaaaagacaccatgttataattttatcaacatgatgtctttcatctatattcaatctttcatcttatcaagagcaatatttagttcaagcacattcacataatcatttgttaacacaccacgctgcttacgatgttgaatcaagtcggccactcttgaagtagatatatgacgagcatcagcaatacgaggtgcttgcttcaatgcattttcaaccgtaatatgcggatctaagcccgacccagaacttgttgcagcatctattgttacatttgaattatcaaatttaacatgatgtttcacgcgtgctattaattcggtgtttccattcgattcattacttccacctgatgatacgccgtttttatataatttttcaggattcatattataatcaactgcactcggtctcccgtgaaaatatcgtgtctctgtccagtgctgtccaatcaattttgatccaactatacgattatcatacgtaattaaactaccatttgcttgttgataaaaaaatatttgaccaattaacgtgatagctaacgggaataaaaatccacacaataccatagttattatcgttaaacaaatactatttcttatcgtattcatggtacagactccttcctcttcacacaaaaaattgtacaatcatatctattaatttaatgcctaaaaacgggacgattaatccacctaatccataaatcaacatattatttataaaaattctatcaatgctgtaaccctttacttttacacctttcatggcaattggaattaaggcaacaatgattaatgcattgaatatcaaagctgatataattgcagatttaggtgacgataaatgcataatatttagtgaagtcatttcaggaatcgttgacatcattagtgcaggtaaaattgcaaagtattttgctacgtcattagccaaactaaatgtcgttaatgcacctctcgtcattaatagttgtttgcctatttttacaacctctattaactttgtaggattcgaatctaaatcaattagattggccgcctctttagcactaattgtccctgagttcatagctaatcctatattcgcttgtgctagcgcaggtgcatcatttgtaccatctcctgtcatcgcaacaatatggcctttcgcttgttcatctttgatgactttaattttatcttcgggtttacactctgcaacaaatctatcaacacccgcttcttttgcaattgtagctgctgttagagcattatcgcccgtacacataactgtttcaatgcccatttttctcaattcagcaaatcgttctacaagaccatctttaatcacatcttttaaataaatcacgccaagcatgacgttgttttcaatgactattaatggtgtgccacctttactcgatacatccatacagatagactcaatattaagaggaatattgccttgttgttgtttgacaagatttatcatactattaggtgcacctttgaataccgatatttcatttgtaatgattccgctcattctagtttcagctgtaaaaggcttatatgtgccatcaatgtctttaggcagctcatttatatacatctgcttcgctaatcgcacaatactttttccttctggcgtatcatcgtaaattgatgacatataagcagcgactatcaatttttccatcatttgttgattcactggtaaaaattcactagcgattcgattgccataagtgattgtgcctgtcttgtctaaaatcattacatcgacatctccacatacttctacagcacgcccacttttcgctaatacattgaattgagtaacacgatccatgcctgcaataccaatcgccgataacaaaccaccgattgtcgttggtattaaacatactgttaacgcaatgagcatcgcaataggtaaaattaaatgcaggtaagatgctattggatataatgttacaataacgactaaaaatataattgttaacgttgttaataatgtaaaaagtgcaatttcatttggtgttttatttctttccgccccttcaactaaggcaatcattttatctaaaaaagatgtacccgcttcactctcaacacgtatttctaaccaatcagatgttacaagtgtaccgccaatgactccatcaaaatcgccacctgattcttttatcacaggtgcagactcaccagtaattgcagattcatcaacggttgctaatccatttattacaacgccatcagcagggattgtttctccattttctacccgaatattttgtccggcttttaactctgtggcgttcactatccgatacgcaccattttcttctatcaatcgagcagttaaatttgattgtgcttgtcttaaactatcagcttgcgcttttccacgaccttcagcaaaggcttctgaaaaattagcaaataatatagttattaataatatgataaaaattgtaatcaaataacctcgcgatagatagctagttccaaatatgtcaggaaaacatattaatatcaacgttaaaagcattccaacctcgacgacaaacattatcggattttttattaattgtttaggattcagcttataaaaactcattttcaaagcttctatcaccattgtttgattgaaatatttatttacatgatgcattttttccatccctttactttattttaaagttaaaaattcaccaataggaccaagtaatagtactggaataaatgtcaaaccacttagtaaaacgataaatacgattagtgatacaccaaaataaggtttatcaatcgctattgtatgtttatcttggtggtatgattttttattcactaaacttgatgaaatcattaattgcaaaataattggtatataacgagaaagcaacataatgattcctgtagagatattccagaatgttgtatcatctttcagtccttcaaaccctgatccattgttcgcagcagctgatgtcatttcatacataacttgtgagataccatgaaaagacggattcgttatactttcacttgctccaggaatcataaaagcaagtgctgaaaatactaaaattaaaattggatgtatgagaaagactaagacaatacatttcatttcacgggcgccaattggcatatttaaatattctggcgttttaccaaccatcaaactgcatataaacactgtcagtaagacatatatcaataaattcatgagtcctacgccttcgccaccaaatacaacatttagcatcattaataccattggtcctaatccacctagaggcgttaagctatcatgcatgttattaacagaacccgttgtaaatgccgtcgtaataactgtaaatagtgctgacaaacctgctccaaaccgtacctctttaccttccatattcgctccatgaattcctaaatttgctagtattggattaccacgatactcactccacatagttaatgtaagaattgctataaaaatgaaaaacattgcgacaaataatatcagcgcatgacgatgtactcgtttaccatgtctacttaacatgcgaccaaataagaacaacattgacataggaagtaacatcatactgcccatttctataaaattgctccaaatatttggattttcaaaaggtgttgcagaatttcctgctaaaaatcctccaccattcgtaccaagatgttttattgattcaagtgatgcaataggtccaaatgcaatatgttgaatatgtccgcttaaagtccgaatcattaaattagcatgcaacgtttgtggtacaccttgagtcatcaataaaatactaattaaacatgataatggtaaaagcactcggacaataaaccgaacaatatcttgataaaaattaccaatgatattagtcaatccggttaaacgtctcaacatcgctatacaaacggcgtaacctgatgcactagatgtaaacattaaatatgtcattacaatcatttgcgttaaatatgtcacacctgattcaccgttatagtgttgtaaattactatttgttaaaaaagatattgctgtattaaacgctaaatctatcgattggtttaaattatgatttggatttaaaaaaagccattgctgaactattagcaatacaaatgttataacccccataaatccattaaatgccagaaaatgtttgacatatgttttagctgacatgtgttctaaatctgtgccgataattttaaaacacatattttcaaatctagtaaatattaaatctactcttgacgattgcaccaatgctacgcgatatagatatccactaaaaacatatgcaatcataaccatcattgttagaaacaaaattatttccatgataaccctcacttaatatatttctaaaatttttcactacgaattaaggcataaaataaatacaaaactaatgcaataactaccaataataaaacgatgagcattgccataacctccttacaacacaacaacatcgtaacaacttgtttatgagagaaacattaattttcaaacttagttattaagaaatcattaagatgtgtatgcagaaataaattttatagcatttaattgtgaagaatattatgatattgctatcgaggtgaaggttatgtcaaacactgaatcgctaaacataggaaaaaagcgtggatctttaacaatttacatcggttacagtccaggtgttggtaaaacatttgagatgctttcaaatgccattgaactatttcaaagtaacgttgatattaaactaggatatattgaaccgcatcaacgtgatgaaacaaatgcattagctgaacaattacctaaaatcgcaaccaattttactaaacatggtagtcatcattttcaatatttagatgtcgaccgcataatcgaagaatcgccgacaatagtacttatcgatgagttagcacatacgaacatttctagagatcgtcatgagaaacgatatatggatattgaagaaattttaaatcatggtatcgatgttcatactactttgaacattcaacatattgaaagtttaagtagtcaaattgaactgatgaccggtgtacatgttaaagaacgtgtacccgactatttcataatgagcgccgatgtattagaagtcgtagatatctcacctgaacaattaattaaacgcttaaaagctggcaaggtatataaaaaggataggctagatgtagcatttagtaatttctttacgtatgcccacctaagcgaactgcgtacattgacgttaagaacagttgccgacttgatgagtgataaagaaaaagtccgacacaatcataaaacgtcactcaaacctcatattgctgtggcaattagtgggagtatttataatgaagcagtaattaaagaggcattccatattgctcaaaaagaacatgcaaaattcactgctatttatatagatgtattcgaaaaaagcaggcaatataaagatagtcaaaagcaagtgcatcaacatctcatgcttgcaaaatctttaggagcaaaagtaaaagtagtttatagccaaaccgttgcattaggattagacgaatggtgtaaaaatcaagatgtaaccaaattaattatcggacaacatattagaaataagcggcgagactttttcaataaacctttaattgaccatttaatgtcctttgaacatagctataaaatcgaaatcgttccaatcaaacaaatacctgttgaattgaaaatgaacaaatcaccctatcgtcctaaaggcaaacggttcgccatagatatgttaaaaatgattctgattcaaataatttgtgtaatgatgggactgtggatttatcaacttgataagcatgagtctagtacgattattttaatgatttttctcatcggcatcattttgttatccatttggacgcggtcctacatcattggctttttagcagcaattattaacgtatttgtttttaattatttttttacggaacctagatatacatttgaagtataccgctttgactatcctattacatttatcgtcagcattttaacaagtattttaacgagtgctttattaaaacaaattaaattccaatacgccattactaaaaagcaactttatcgtacagatttattatttcaatttaatgattcgattaaacaaacttatacagttgaaaacttactaataaatgctggataccaaattaatcaattattgcaacaatcaattactatatacgttatcaatcaatccaaagtaattaaaacaataccattgcaaaaccatatcgataataagactcaacagcatgaacaagcattaagctgggtaattaaaaatgaaagacaagctggtgcaacaacagatacatttccaggcattaataaatggttgataccaattggcacatctccgattaaaggcattctagccattgattaccaaagttctcaagtgattaatccatatgatgcatcaatattagaatcaatgttaaatgaactttctctcgccgttgaaaatgtgacgttgcttaaacaaacaagagaatccatgttacaggctgaacgtcaactgacacattcaaattttttaagatcaatttcgcatgacatacgtacaccgttaacaacaattatgggaaatttagatattttagtgtcacatagtaaagatatgtctatcatagaaaaggaacaattacttgtgcatagttttcaagaaagtcagtatttatatctattagtgacaaatattttatcattaacaaaattacagtcatcaaatgttcagataaaattgcaaccttatctcgttagtgaattagtagaagaaatcgatatgattttagaacgtcgccatttaaaaaagcgtataactgtatcatcctcagtagatttacagtttatacacattgacagtaagttgattttacaagctttattcaatttgattgaaaatgcagttaaacacacttctactgacaccaaaatcaatttatctattcgttatgctagcgatgaacaaatcgaatttgctgttatagacgaaggacctggaattagtatagaagaacaacaaaagatattcgagcctttttacacagggtcaaataaatattttaaagataaccaaaaagaaagcatgggactaggcttatatttagtacagactatcctacacaaacatcaatcaaacctacaatataaaccgaaccaaccacatggcagtatattctatttcaatatagatacagactttaatgaaggagacatataatgcaatctaaaatattgataattgaagatgatcacgcaatcacacatttacttgatgttgcattaactttagattattacaatgtaactacagccgaaaatgccacacaagcacactttaaaattcaaattgataaaccagatgtcattttattagatttaggtttaccagataaagatggattatgtttgatttcagaaatcaggcaacatactgacattcctatcattgtaataagtgcaagacaagaagaacaaacaattattcaagctttagataacggtgcgaatgactatatgactaagccttttaatgttgatgagcttcgggcacgaattcgagtcatcgaaagaatcgctaagtcacatcaagaaactaacattgtatttactaacggtttgttaagcatcgactttggctccaaatctgttgttattaataatcaggaggtacatttgacaccaaatgaatttagcttgttagaactattgtcaaatcataaaggaaaagtactcacttatgagatgatattaaaacgaatatatggctatgttaataagactgaaatgcctagtttaagagtgcatatgacatcattaagacaaaaactttcacaatgtcacgaggacgcaaaagatattattaaaacacatccacgcattggttatcaaatgttgcagtggaaagagaaataattaaataaaaaagatcgctgccattaaacgaatgattggcagtgatcttttttatattcaacttattatttattgcgcactagtgtcagcaaaatgccctattgttttttacaagcacatgataccgaaattactttcataaaatttatttttggtcaattattcttagttttagtggttgttatattctagattcatatttatatttaaacagaatgatataaccgcacacagctctcaatccaattaaatatttaacctttaaaatgttagtattttgatatctacatagaatcagttattgaaaacaaaaaagagctcaagacattacatctttaagctcttaatctataaattatttttgatggtcagcaaatgtgcgacctttcataggtctgcttccaccgctactcttctctttacggtcgaatttttttgtacttttcttcttacttgagtatccttttgaacgtttactcttactgtcaaatttaggattaccacgcttactatttctgttacgagaaccacttggtttaccgttacggcctttgcgagataatggtttttcaaaagttaattgaacttcaacttcatcgttcgcttctactaactcttgtaaaagtgcagcaactaaatcaacatcgttatattcatttaacaactctgtagaaatgcgtttcaagcgtgattctgactctttagacatccagttttcaactttttctttgatgtcatcttcacgtgcttgaagtacttctttacgatgtggtggacgaagtgcgctcatttttctaccattagcatcttcaatttgtctaatgtaatccatttcaattggatttacaaatgttaccgcgataccttctttaccagcacgacccgtacgaccaatacggtgtgtatagctttcagtatcttgaggtatatcaaagttataaacatgactcacaccagaaatatctagtcctcttgctgctacatcagtagcgactaaaatattaatttggtcatttttaaatttctttaatacttctaaacgtttcgcttgtgtaatatcaccatgtaagccttcagctttatatcctttagaaatcaaagcacttgttaattcatcaacacgacgttttgtacgtccgaatacgattgctaattcaggttgatgaacatctaggaaatttgtaaatgtatcaaatttctctaattctttaacaattgtatagaattcttcgatttgtggatcagacatttcattattcattgtcttaatgatttttggtgatttcataaattgttgtactaaagcttggattgctttaggcattgtagctgagaacaacattgtttgacgttgtactgctggaattttatccataataaatctcatatcatcgatgaatcccatattcatcatttcatcagcttcatctaaaatcaaagtatgaattccgtccgtttttaatgtgcgacgatttaaatggtcgataacacgcccaggtgttccgactacgatttgtgggccttttttcaaggctttaatttggcgttcgataggcataccaccgaatacagtaacaacttggacaccttgtccacggctaaattctcttaattgttcagctacctgcattgccaattctcttgtaggtgctaaaatcaacgattgaaccccttgtttccctaatactttctcaattaaaggaataccgaatgctcctgttttacctgtaccggtttgagcttgcccaaggatatcaattccttgtaacgcataagggatactgtctttttggataggtgtcggctctttaaatcccattgattcaagtgactgaaccgtattatccgaaatccctagttctttaaaattttgcaaaataattctcctttttacctgtttatttctcaatatacttttgcatataagttcattaatatttcatcaacttctatatagtaccaccaaaaaaatttaatcgcaataaagcaatttgcgaatatttattagaatcacattaattgattgtcatatttttgtcaaaaagctagcattagataagatgtaagcgttacgcatcattcgaataatcattataaaaaaatttttataaaatacgtatatcgttaacattccacaacaaattttactgaaacacatgtgaaattagacattataatactacatctttttgtaaaatattatataaacattcaaactacttcctatatatagtgtgtacatagaattaaccttgatttagtttcaaatttatagatttaacataaaaagaaaaaggcaattttgtatttacacacaaaaccacctcatctttgtaatcttttagtattaattcaaatcatttttataagtaaaaggtcgctcgactaatctctatgaaattaaagcatttacaacttcttctaacttcataccacgtgagcctttaactaatacacggtcatgcgcttttaaatcgcttgttaaaactcctatcatatcgtctttagaattgaagtgttgtgctttttcgacatgttgctggcccgaatcataaatatacttcgcttcattaccaaacgtatacaacacatctatatgcttttcttctaaataattacctacaccgatatgcatttctttgctattttcacctaattctaaaacatctcctaaaattagaatgcgacgccctgtcaaggtactcagtgtatcaatagctgctctcatacttgtaggacttgcattataggcatcatttatcacagtaatatcattttctaatgtatgttgctccatacgcataccagttaagctgacattttttaaattttgatagattgtgttatatgtcaaacctaattcatgaccaaccgcaatggcaatcgtcgcatttttcatattatgctttcctaatattggcagatcataatgttctttattattaatcgtaaatgaaatacctgtagtatctctatcatcaacacaacaaactaatgcattatcagtagcaacaccaatactaatacattttgcattttcaacttctttaacatgcggttttaataatggttcatcgccatcatatataaacgtaccattatcttttagacctattgtaatttcagatttagctttagcaatcccctcacgcgaacctaaatcttgcatatgtgactcaccaatattagttatgactgcaatatctggttgagcgaggtttgacagaaattcaatttcatggaaacctgacatccccatctccaatattgatatttcagtatcattatctaattccaaaatagttaaaggtaaaccaatttcattattgtaattaccttgcgttttcttaactttaaattcggtatgcaatacactttcaatcatatctttagtcgttgttttaccattagaccctgtgacggcaattactttagggtttacatgtctcaagtaagcttgtgccaattgttgtaatgccgttaatgtgtcttcaacccatataataggcccgcttacattttcatctataggtgtgcctttttgataaaaagcagccccagcaccatcttgtaatgccttagagacaaagcgatgaccgtcaacattttcaccttcaaatggtataaataacatatttttagaaattgctcgtgaatcaattgtgactccatttatctcttgatttaaaaattgatcttcaatttcacaaggaatccatgattgaatttgctttaatgtaacattaatcataataacaacctcagttagtcaattttgtatttatttttctgtttatcctggtgacgttctttagcaagctcgataagttttgtaatcaattctggataagataagcccatattttcccataattttggatacatactgaaagccgtaaatccaggcattgcatttgtttcattaatatatatttggttgtcttctgttacaaagaaatccgcacggactaaaccagaacaatctgtcgctttgaatgcctctaatgccatatttctaagcgttaattgaacatcttcgtctaagtcagctggaatttgtaattgaaccttaccatctttatattttgatttgtaatcgtaaaacgcgacatcttttacgacttcacctggccatgtcgcttcaggatagtcatttcctaaaactgctacttcaatttcacgtgcgttaacgccttgttcaataacaagcttacggtcaaattggaatgcttctttaataccttctttaagttccgcttcattactacatttactgatacctatacttgaccctaagttagcaggtttaacaaagactgggtaatttaatttatcatttactaattttaaaatgttatgttcatatttttcatattcagaacgtaagaaactaatataaggtaactgtggtaaccctcgatgttcaaataattgtttcattacaagtttgtccatagaacttgcagctgacaatacaccatttcctacatatggtacatccaatacttcaaaaagcccttgaatcgtgccatcttcaccattaggaccatgtaataatgggaatactgcatcgtatggttgtcctgaactactttctttcagtagctgtgaaatctcaagcgcctctccattttctaaatgaagctcatcagtagatttaatttcagttgtaatattattttgctttctccaatcaccatcattggtaatataaatgatatcaacatgatatttgtctttatctattgcatttaatacattttgtgctgtcagaatcgatacttcgtgttctgcacttttccctccaaaaacgatacaaatattttcttttgtcatttcgttttcctccaatgatatatcagggtttgctaccttaatataaattaatattgatttagtccaattgttaaatgatttattcgcatctttgaatcttaatagtatcacattttaatgctgttttgcattttaaaaacgaggcgttatgtgtctgtatctatgttgattcatttataatcagaacaatattcccttctattttattcctaattcaaattgaaatctatagctgatatcactgtgatattctagctaatttttaaaaagtcatgtaaaattgatataaacattagtgagtataaaaggagtttgcaatgaattattcatctcgtcaacagccggataagcattggcttcgcaaagtagactgggtattagtagccactatagctgttttagcaattttcagtgttctgcttattaactcggcaatgggcggtggtcaatacagtgctaatttcggtatcagacaaattttttattacattttaggtgcaatttttgcaggtatcatcatgtttatttcacctaaaaagattaaacattatacatatttattgtatttcttaatctgtctattattaataggattgctcgttattcctgagtcacctattacacctattatcaatggtgccaaaagttggtacacgtttggccctatcagtattcagccatctgaattcatgaaaattattttaattttagcattagcgcgtgtcgtttctagacataatcaattcacatttaataaatcattccaaagtgatttgttattatttttcaaaattattggtgtctcgttagtaccaagtattttaatattactgcaaaatgacctaggaactacattagtattagcagcaattattgcaggtgtgatgttagtaagtggtataacatggcgtatcttagcacctatctttattacaggtattgttggtgcaatgacagtcattttaggtattctatatgcacccgcattaattgaaaatttattaggtgtccaactgtatcaaatgggacgaatcaattcatggcttgacccctatacatatagtagtggtgatggctatcatttaactgaatcacttaaagctatcggttcaggacagttactaggtaaaggatacaatcacggtgaggtttatatacctgaaaatcatactgactttatcttttcagtgattggagaggaacttggttttatcggttctgtcatattgatcttaatatttttatttttaatcttccatctaataagattagctgcgaaaattgaagatcaatttaacaaaatctttatcgttggtttcgtcactttacttgtgttccatattttacaaaatattggtatgacaattcagttgttaccaatcactggtattccattaccatttattagttatggtggtagtgcgctatggagtatgatgactggaataggtatagtcttatcaatttattatcatgaaccaaaacgatatgtagatttatactatccaaaaagtaattaatttaaactattttgagtttcaaatatcataacttttcaagatgacgttatatagtctatttgcgtcgtcgatttaaaatgtcatatatagatattactcgataataacaatccctctttgaagtgcttgagacattaagttcttaggcaatgtaaaaaagctaatttctattaattatttgatagaaattagctttttttatatgtattttataatgtacagctcgttgagctgctattttccttatattaagtgccattaatacaaaacctagctctcgtttaactttatttattcctcgaactgacatacgaatgaaacccaaaatagctttcataaatccaaaaacaggctctacatcaatttttcttattggatttcgaatttggcttcatgcattgatgtctcaaagagcttgggacattaagttcttaggcaatagtaaaaaagctgatttctattaattatttgatagaaatcagctttttttaaatgtatttgataatatacagctcgtcgagctactattttccttatattaagtgccattaatacaaaacctagctctcgtttaactttatttattcctcgaactgacattcgagtgaaacccaaaatagccttcataaatccaaaaacaggctctacatcaatttttctttgactatagatttttttcgtttctggttcagaaagcttttgattaatttgggctttaaagtattcccaattataattcttcatgattttcttattggatttcgaatttggcttcatgcattgttgcctcaaagaacatgctgaacagtcatcgcattcatatagtttgaagtcacgtttaaaaccatatctatcattacggtatgcatatcttttaaaacctattcttttgttattaggacatataaattcatcattaagttcgtcatatttccagttttgagtgttaaaaatgtcacttttaaactttctcgttttatctttaataaacataccatacgtaataagtggcgttttattaaaatcatctataatagccatatagttttgctcactaccataacctgcatcagctacaatatactccggtaaataaccgaaggtattttgaatcattgttaaaaatggaattaaagttctagtatctgtcgggttttgaaataggtcataggataaaacaaattgagaatttgtcgctatttgtaaattgtatcctgacttaagttgggcaaagtgtcttatttttttaaagtatttaaaagtaaaattacatgttaatacgtagtattaatggcgagactcctgagggagcagtgccagtcgaagacaggggccccaacacagaagctgacatatagtcagcttacaacaatgtgccggttggggtggctgagacggcaccctaggaaagcgaagccattcaatacgaagtattgtataaatagagaacagcagtaagatattttttaattgaaaaatatcttactgctgtttttttagggatttatgtcccagcctctctatagagggattttgttatatactacttgctttcattttagtaaatccagtcaaaaaagctatcatcgaatagtccgacgatagctttaacggtgtgtgattcacaatcacagtcaattattttaattcgtgacttactttattagatgctggcaaagtattaataatgtctaaacgagatttagtttttttaatattcacacctaatgatgacaatagtttgactacattttgaatcttttcaggacgtttcattattatcacctcgtttggatcgctttcaatattatcttaccctattcgacatacctttactacatcatttacaaaatttttaatttattttcaaaattaaaatctatagcgcactctacattataccctaaaatacaattttgtatccttcatcatagatttctttttcaatactattcaaatttgctggtgtctcatacgctacagttacctgaccgtctattatattaataatcacttgatgaacacctatcatatttgaaatgcgttctgtcaattgacttacttgttcttctgtttcaattcccgctgtgtaaatcgtattttgatgtatcatcttaaactcctttagtctttaatcaatttttgaaaagtcactaataactcttccattgcctcttcctgagcaccttgattaactttattcataatacaacttttcatatgttgttctaataactttgtcgcaacactgtttaacgccgaacgtgtcgctcttatttgcgtaaggacatcatcacaatagacatcttcttcaatcatgcgattaatcgctctcacttgtccttcaattcgatttaaacgtgatttaagattcgtttttatttgttcagaatgatgtgcattatcttgttcagtcatagcattcactccttcatttacattccttactatactatatcccataaaacacaacgtcaacacaaagtgtgtttttcaaactaaattgtcatgatatttaaattgcttcatgatacaattaataagatatactactcgtttaagattttcgatgggaggtttcaaatgatagagttattatccattgcactcaagcattctaatattattttaaattccatatttattggtgcatttattttaaacttattattcgcctttaccattattttcatggaaagacgttctgccaattctatctgggcttggttactagtcttagttttcttgcctttattcggcttcattttatacttactattaggacgacaaattcaacgcgaccaaattttcaaaattgataaggaagataaaaaaggattagagttaatcgttgatgagcaattagccgctttaaaaaatgaaaacttttcaaattccaattatcaaattgtaaaatttaaagaaatgattcaaatgttgttatataataacgcagcatttttaacaacagacaacgatttaaaagtatacacagacggccaagaaaaatttgatgacttaatacaagacatccgtaatgctactgattatattcattttcagtactatattattcaaaatgatgaattaggtcgtaccattttaaatgaacttggaaaaaaagcggaacaaggtgtagaagttaaaattctttatgatgacatgggttctcgtggactgcgtaaaaaaggcttacacccgtttcgcaataaaggtggacatgctgaagcatttttcccatcaaaattacctttaattaacttgcgtatgaacaatcgaaaccatcgaaaaattgttgtaatagatggacaaattggatatgttggtggttttaatgttggtgatgagtacttaggtaaatcaaaaaaattcggctattggcgagatacgcatttacgaattgtcggggatgcagtgaatgcattgcaattacgatttattctagattggaattcacaagccacacgtgaccacatctcctatgatgatcgttatttcccagatgtaaattctggcggaacgattggcgtacaaatagcttctagtggtcctgacgaagaatgggaacagattaaatatggttacttgaaaatgatttcatctgctaaaaaatcgatttatattcaatctccctatttcatacctgatcaagcctttttagattctattaaaattgcggcattaggtggtgttgatgtcaatatcatgattcctaataaacctgaccatccgtttgttttttgggctactttaaaaaatgcagcatccttattagatgccggtgttaaagtatttcactacgacaatggctttttacactcaaaaacacttgttatagatgatgaaattgcaagtgttggaacagctaatatggaccatcgcagtttcacgttgaatttcgaagtcaacgcctttatttatgaccaacaaattgccaaaaaattaaaacaagcttttatagatgatttagcagtatcttctgaattaacaaaagcacgttatgctaagcgaagtctttggattaaatttaaagaaggtatttcacaattattgtcacctatcttataaaatagaaatatgaggagtgtaactttaatgcaacaatcagacatcattagtgcagccaaaaaatatatggaatctattcatcaaaatgattttacaggccatgatattgcgcatgtatatcgtgtcactgctttagctaaatcaatcgctgaaaatgaaggtgttaatgatactttagtcattgaactcgcatgtttacttcatgataccgttgacgaaaaagttgtagatgctaacaaacaatatgttgaattgaagtcatttttatcttctttatcactatcaaccgaagatcaagagcacattttatttattattaataatatgagctatcgcaatggtaaaaacgatcatgtcactttatctttagaaggtcaaattgtcagggatgcagatcgtcttgatgctataggcgctataggtgttgcacgaacatttcaatttgcaggacactttggtgaacctatgtggacagaacaaatgtcactagataagattaatgatgatttagttgaacagttgccaccatctgcaattaaacatttctttgaaaaattacttaagttagaatctttaatgcatacagatacggcgaagatgattgctaaagaacgtcacgactttatgatgatgtacttgaaacagtttttaacggaatggaattatcacgactagacattggagttgtagtatgatgatgcgatgtaatagcgtgttgttgtggaagcttggtgtcatgccatgttactttgatgtgttgttgtgggagcttggtgttgatgccatgctactttgatgtgctggtaccacgatgcgtcttgatgtagtgctatgatgtggcgttgcggtgttatggtattgtagcccggtttggtattgatgccatgccgttacaattctatgatatgtcgttgggacgttgcaatgtgtattatgccgttgtgacgttattatttcacactgttacatgtatttgtgaattgctgtggaaatgttgcgacatatactgctacactgatgaatcattgtgtcaagatgacattgcaatgaagaatagcaactctgttattaaccactttttacatggtgaaatctcgttaatattatttcaaataaaaacagcagtaggatgactttcacatttgaaatcatcttagtgctgtttctatttatcacatattgtataatgtgacactaagtttcgctattgaagcgaaaaataatgtgctccctataaagttaaaattatcttcaacttttagggggcacattatttggacttgctaaggttatttctttttctttttagacactacttgtgtgtttttgccttttttattgctgccgccgttgtgctctctttcatacgcttcaatgaaaggctgtacttcttttttagcgactttttcataataaatgttcgcaaagtgtgtttgaactacaaggaacgccgcgctgactgaccagtacaaaccaagtgctgatgctgagcttaatgaaatccagataatcataattggtgaaatgaccatcatcatgtaacccatttgacgttgttcgtctggcatcgttttacttgatacatatgcttggataaagtataaaacaccggcaataattgtaatccaaatatcaggacgtcctaaatcgaaccataagaagtgtggatatttaaacaaaccatctacaagttggtctttaagtacaaagtataatcccatgatgattggcaattggattagcattggtaaacaacccaacatactcttaatcgggttcatgtcatactttttatatacttgcattaattcttggtttgcagccattttttcttcttgtgtacgcgcacgcttcactttttcttgaattttctcaacttctggctttgcaactttcattttttgacgcatcatatgactatttttatagtttgacaacatgaatggtaataaaataatacgaattaccaatacaagaataataatagctaaaccataattgtcgtttaataagttatttcccaaccaatccaatacatttttcattggatctacgaatgtattgtagaaaaacccactacgtttttcaggtttagaatagtcacaaccagccaaaaagaccataatacctaaaaataatggtagtaacgcttttttcttcatttttccacctctatcattatattcacataggatttattctatcacattaatgagtacgtatgaaacaataagtggaaaaatttaactaattattaaaaaaatctttgaatcgattaacagtcttttcaatattttcacttttagaaatggctgaaatgactgaaattccattggcacctgcttctacaatcggcgccacgttactagtatttataccgccaatggctacaatcggtagttgcggattcatttctttaaatgttgcaatcatttctggacctactggtgtatgcgcgtcatgcttcgacggcgtaggatagattggtccaacacctatataatcaacatgagttaaatcagattttgcatactcatctaaatcactaatactaaatccaataattttatcagtgaaatattgtgctatctctttgactttcgcatcatcttgaccgacatgtataccatccgcgttaatttcttttgccaaggatacatcatcattaacgataaaaggcacatcatattgatgacagagatgctgtaattctttagctaatacaagtttatcgtttccttttaaagctgattcacccttttctcgaaattggaaaagtgtaatccctgcctttaatgctgcttctaatacttcatgaatagttcgatgactcggaacatcggaggttccacaaataaaatacacatttagatacgattggttaaacatattattccacctcttgaatgcgaatccgttgttgataggttgtttcatttaaatgatataacgtatcaagcaacaatggtgaaaacgtaccaggaccaccacaattttcattttcagcagctacctcagcagcaatattaaatacgcttaccgcttcaattaacgcttctatgtctggttctgtttctctaaataaaaatccagcaataatgcctcctaataaacaaccagctccagttactcgtgctaataatggagatccattagctaatacgattgctttatcaccttgaacaataacgtcctctttacctgtgattactattgcagttttatatattgcgtaagcctttttcgctattgtaaccgcatcaagattagcatcactatctgtacctttcatagttgctgtatcatcaatcaacgctaatatttcagatgcattgcctttaattactgatactttcgctgatttcaataataatttacaaaattgctttcgatatgtagaagcaccaacagctacagggtcaaatacaataggtaagcctgcctcatttgccgtttgagcaatcgcaataatatcttgttcattttgggctgttaaagtaccgatattgattaatagcgcttgtgcaactttgtaaaattcttcagcttcttcgggagcttcactcattgcagggctcgcaccaatacttaataaaccattcgctgtaaaatttttaactacatcgtttgtataacaaattgttaatgggttttcaatacgtatgttatttagataattcatcgtctaatccctctttctttaaatatgcaaaatgattcactggacctctaccacggccgatttcaggcgtatattgtatactcattgaaataaactttttagccttgtgtacagcctcaaataatggtctaccttttgcaagttctgccgttataactgctgaaaatgtacaccctgttccatgcgtatgttttgttttaaatcgttcattttcaaatgtttgaacaccttctttagtaaataaataatcttttgctatatcagcatcatttgaatgaccgcctttaatgatgacacctttactaccaatctcattaataaagatgcggccagcctgcataattttttcttcactatcaatggttagtcccgttatttcttcagcttctggtaaattcggtgttactacatcagctaatggcaataacgtatgttgcaagttttgctttgtgttattatccattaatgaatcaccgcttttcgccaacataacaggatcaattacatacggaatagattcatgttgcattaaataatgacgaatcgtttccatagtatctgctgtagcaatcatccccgttttaatagcatgcggtaaggtatcattgaagacactatcaagttgttcatctacccattgatgatttaaattatgaatatgttgtacgcccaatgtattttgagcaacaatacttgtaacgacgcccataccatatacaccacatgaatgaaatgattttaaatcagccattacgccggcaccacctgttggatcagtacctgcaatggttaatgctattttaggtttaatcatttacttttcctccaaattcccattgttctagtgtcatagccatattgaaaaatcgacgctcatgtatgcaactttctaaaaatacttgctttacttgttccaattccttgtcagacattgattcggctaatttattcattaatgactcaaatacgttaattatgtcatccatttcagtactataaaaatcaaaccattttgccgtatctttttctctattaagcttatgatcactttgagagcgcttagctaattctgcataaatatatggacaaggtgccattgcagcaattgtataaatagcattttcacgactatgcgcttggaaatacatatgttttatgtaatggtcgccacttggaggccaaacttttgttttaatgatttcttcgtatgattcaccaacaatttgcgctaaaatatcatgcgcaagtacttcaccttcaaccataaattctatttgctctactaaaaattttacgtcattcatgctattcatttttggaattaacaaagcatataagtttgtaaattcttttaaataagctgcatcagcttgtaaataatgacgtaatgcatcagcttgtatattgcctaataacattttttgaataaagtcatcctcataaatatcattaatgattggctttgcagcttggtacaatttttgtgaaaattccattgtaaaaaatcctccctaaataaaaaaactacttccaacatgaaagtagtttgatggcaatgttgctatactagccccatcacttcaataactactttcctacgttggtactaaccaaatcaggtcataagggtctgaacagttcatctcagccatatcattaggctcccctagtagttccttagtattcaattgcaaattaatcttagcaaacggtttcaacattttcaattattgttgctcagttgggagtgggacagaaatgattttttcgcaaaatttatttcgtcgtcccaccccggcaaggttgactagaattgaaaaaagcttgttacaagcgcattttcgttcagtcaactactgccaatataacttcgtagagcatagaacattgatttatgtcccagcctgtacaattatatatatatttgcgaaataaaaaagaccggaacatatcgagaattccccgatatattccaatctaaaagttacttatataactattggttagctatgcataaatggcttatgcagtaacccaatgtccagcgccaccagtgttatatagttttactgctgcggcatcttgaacactttcaggagcatttgctggtgatacacctttatatttagcaggtgctactgaatcccaagttgattgtaagaattgatacttaccagctgcacctgatgttggatttacagcatgaatattgccacctgattcacgttgagcaatttgttttagatgatcattcacatttactgatgaaccttctgatgcttttgattcagttggtgttgcagtaacttgtgaattgtttgatgttgatgcttgtggttgttgagtttgagcattttgtggtgcttcaacttcttgtgattgtacttgattagattgatcagctgatggtgcaacattattagttgcaggtgcttgtgcactcatgtctgctccattagcacctgttgcatggtaattccaagcaaagtgtgtaccatctgattcaaagtgataagtaaacccttcatagtcaaatgtataattataagcgccagcttcaattggtttttgatttaatgtttgatcatttgattgcgccatttgcgctaaagatgctttatttaagtccgcttcacttgcttgggcttcgtgacctgcatttcctgctacgattcctaaacctactgctaatgatgatgcgagtaatgttttcttcataatcttaaaatcctcctacaagtaatttgtttctctaaaagttttacagagactactgtaacatctgtaaaatccgtgcaggttacaacaaaataaaaaaatagccttgttttttacacagtgattacaacggaatcctccataatttcagatatgattctatcgagaattgtcatgacagtaaaaatgtttttaatttgcaattttttatgtaatcgttttgcaatctatgtctattttctattagaaaaactacacaaaaagacgacctacacaacagtactagtcatgtaagtcgtttttaagtgagtatatttcaagttaattagatctataaaaaatttaggatggattaaatgtatattaaggatgtttaggataattggatttaaatttctaataagtcatgattatctatattttgagagtcaatatctaaaatactatctgagagaatttcattattttgggatttaggggacataaattttattgtttcaacatataattcagtgacaaagtgtgtttgtccgtctttatcatactttcttgatctcatttgaccagttataccaaccaatgtaccttgattagtgtatctttctatattagaagctaacttgccaaatgctttacagaataagtaatcacagacgatttctccattttcatctttataatttcggtgcgttgcaacacaaaacgttgcaatttttctatcctccttttcaaatatttgtgcgtctttcgtcagtctcccgacaattacgattttatttagcatgtagtgtgtgattcacctcctatgcctatatcttaattactagcttaaaaatggtcaaaatggcaaattttatataattaatagctatagcatctcgttatttgttatatttaaagaaattagtcatgaaatgaccttaaatcttctaaataattcaaaaatcataaatattaaactaatgggatgtgggaatatgaaaacttttaaagcagtaaggtttcaaattgtgaatgaacacggcagaattatagaatatgaattagaagatggcgtaataattaataaagaggaaagtggcacgggttggctgcttgaaattgtcatttctaatgagcattatgaaacatttaaggaatatcaagacaatgaacagttattggatattcgtgtcgtcatcacgcgtccagccaatgatccagctttatttgaatctactgtgaaaagtattaaaaattttaaaacaacaatgtctatcgtatttgaatgtcatatttacactttacgtcaacagtatgctgaaagtttattagaacaacttattgatgatggattatctggtgaagaattaaaaaaatcatttaatcgaatgatgcagtctaaaccaaagttaaaggatgaaaaattagaagagtaaaataaaaaacattcaaagattatgccaacacattaaatctttgaatgttttttgttttattttacatcttgaattgcaaatgtaagttcacaactacaagcaagttgaccatcgacagtagctttagcattacctttaccgattggtcctttaattttagtgatttctacttccaacgttaaagtatcgccaggtactacttgacgtttaaaacgacatttatcaataccagcaaataaagcgattttacctttattttcttcactatttaaaatagctaccgcacctgtttgagctaacgcttcagttattaatacgcctggcattaccgcatactcaggaaaatgcccttgaaagaatggttcgtttcctgatacttgtttaatagccacgcaacgttgaccttcttcatattcaacaactttatcaattaataaaaatggctgtctgtgaggtataatttgtttaatttggttataatcaaaaattgtttccatggttgaaatcctccattatattaatttactgaattaatcgttaatacgttcaatgtctgcacctaattgcttcaatttaccgtgtaagtcaacatagcctctatctaggtgcgttaattcagtaacgcttgttttaccatcagcaactaatccagctaaaattaaggctgctgctgctcttaaatcagtcgctttaacttgtgcaccttgcaattgacttttaccttcaagtttagcactacgaccttctacattgatattagcattcatacgtttgaactctgcaacatgcataaaacgattttcaaatacagtttcagttactactttatgtccgtttgctgttaataataatgccatcatttgtgactgcatatcggttggaaaaccaggatgcggtaatgttttgatgtcaacaggctgtaaatctccttcagcacgtacacgaataccatcttcttgatattccaattcaacgcccatttcttctaatttatacactaaactagccatatgttctttgattgcaccacgtacaaaaatatcgccacgagtaatggcaccagcgatcagtaatgtgcctgcttcaattctatctggaatgatagcatgttctacaccatgtaatgattctacaccattgattgtaattgtgtctgtaccagcaccagtaattctaccgcccatttcattaatgtagtttgctaaatcaacaatttcaggttctttagctgcattttcaattaaagtcttacccttagctaatgatgctgccataataatattttgtgttgctcctacacttggaaaatctaaatgaattgatgtaccttttaatccatctttagcattagcataaatattaccattttcaagatgaatttctgcgcctaaagcttcaaaacctttaatgtgttgctcaatcggtctacttccaattgcacaaccaccaggcaatgcaacaatagcatgtcctagtcttgctaaaagaggtcccataactaaaatacttgcacgcattttactaacatattcatatggtgcctcttcatttagagtctttgttgcatcaacgacaacagcattttcgtcctttttgtatgtaacgtcagcatttaaggttgttaatacattatttattgtttctacatcacttaaagctggaacattaactaatttgctcggtttatcagaagctaataaagatgctgttaatataggtaatactgcatttttagcaccttctactttaacttcacccgttaatttatttccacctttgattactattttatccatcgtaaatcctccacttagaactcctattactttacatttccctattttaaaattattttaagtcattatttaattatatctagttttgattacaaatcatagagttagacttattttattaaatattttacctgcgtcgagtattgtaacaaatctacaataaaattgcttactgcagtgcctaataaaatagcaacaaatatcatacacacttgtaattgagtggcatatccttttttaaaaaattgatctaatctaattgattgtaaagcccaataggcaatacaaatacatacaacatgtaacactaaatggataactgcatattgtccgatataatccattttatcacctcataagattactgtattacattgtacatgaaaaatttaaataatgatacaaagtttaatacccgtttttagtaaagtttaagctaacttactatataattctttttacataaatatcataactataaagtatcttggcatggaaaaatgtagctactttcaaaaaaagaaacgtcgactgtagatagtggtgaaaggaaattttgattttagcaatctattaatgattgtaaaaagtaaaactattcttgggagtcgaacataaatcgatgtctagactctatagtgttatatttggcagtagttgacggggccccaacataaagaaattggattcccaatttctacagacaatgcaagttgggggcggggccccaacacaaaagctggcggaaagtcagcttacattaatgtgcaagttggggtgggccccaacataaagaaatactttttctttagaaattagtatttcttatcaggctgggacataaatcaatgttctatgctctacgaagttatattggcagtagttgactgaacgaaaatgcgcttgtaacaagcttttttcaattctagtcaaccttgccggtggggccccaacaaagagaaattgtattcccaatttctagagacaatgtaagttggggtgggacgacgaaataaattttgcgaaaatatcatttctgtcccactcccattcctatttttaaatacacattagctgtgtttaatgataaagaaccactacatcataaatctttaatggttctttatcaattccttccccactctcatgttttgtatctttaaattaatataattcaaaaaagggtcgaagatatgaaatcacatcttcgaccctttatttactattttaattcagccacacgcaaacggttatttgctctctctaaagctctttcggctctatgaatatcagtattgtcgtcatcattttccaagtgagactctgctcttgctttagctaatttagctctttcaacatcaatttctcttgcagtttctgcagtctgaacaatgattgaaactttatcttttctaacttcaacaaagccatcgcttacagcaatatattcagttccatcgtgaaatttcacttttacaaagcctgtttttaaagcagctacagttggaatatgtccactcatgacacctatctcaccagctgttgtttgcataacaacgagttcaacattatcacgattgtaaacagaaccattaggagtgacaatatctaggtttaatgtattcattatccattcctcctaattgttatacttcaacacccatatctttagcttttgcaataacatcatccatgctaccaactaaacggaatgcatcttctggaatatggtcatatttaccatctaagatatctttaaagtttgcaactgttgtcttaacaggtacataagaacctttttgaccagtaaattgttccgctacgtggaagttttgagataagaagaattgaattctacgtgcgcgttcaactgtttgtttatcttcatcagataattcgtccatacctaagatagcaatgatatcttgtaattcacggtatttttgaagtgttgattgtacatcacgagctacttcataatgttcttgacctacaattgatggttccaatgctcttgatgtagacgctaatggatccacggctggataaatacccatttcagttaatttacgttctaagtttgtagttgcatctaaatgggcaaacgctgtcgctggcgctgggtcagtatagtcatcggcaggtacgaataccgcttgaatagaagttactgatccttttgttgtagacgtaatacgttcttgtaattgtcccatttcagtagcaagtgttggttggtaacctactgcagaaggcatacgacctaataatgcagatacctcagaaccagcttgtgtaaatctgaaaatgttatcgatgaataataatacgtcttgaccttgttcgtcacggaaatattcagccattgttaaaccagataatgcaacacgcatacgtgcaccaggtggctcattcatttgcccgaataccatggctgttttcttaattacaccactatcactcatttcgaagtataaatcgttaccttcacgagtacgttcacctacaccggcgaatacagaaataccaccgtgctcttgagcgatgttgttaattaattcttggattaatactgttttacctacaccggcaccaccgaacaatccgattttaccacctttaatataaggtgctagtaaatctactactttaatacctgtttctaaaatttgaacttctgttgaaagttcatcgaatgctggtgcttgacgatggataggatcgcggcgaacagaatcactaatttcttctttaaggtcaattgtttcacctagtacattaaatacacgacctaatgtttcatcaccaacaggtacactaatttctttgcctgtatcttttacatccatgcctctttggacaccatcagttgaatccatcgcaattgtacgaacaacgtcgtcacctaattgcagcgcaacttctaatgttagttgtattgtaccttcttctttaggcacatcaataaccaaggcgttattaattttaggaacttcgttatgttcaaatcgaacatcaattacaggacccataacttgagttacacggccaattcccatgctattttcctcctttaaatattattcaagcgctgcggaaccaccaacaatttcagtaatttgttgcgtaatttctgcttgtctcgctctgttatattctaatgataagtcatcaataagttcagttgcattatcagtggcatttttcatcgcagtcatacgtgttgcatgctcacttgcttttgcgtctaatattgttccgtaaatcaaactctcaacatattgaggcaagattacacttaagatagattctttatctggctcaaattcataagaagacaaatgaccatgtcccttactagaatcctcttgagataatggtaatacttgtctagatgtaggcttgttttcaagaacgctgacataatgactatagtatatatttaattcatcaatttcttcttcactgtataagtctatagcatggttagctagtgcttgaacagatttgaaagaaggttgatcaggtacgtctacttgagaatactcaatgtcataacctctattttttaggaaatcaacaccttgttgccctaaaactacaatactgtattcgctactatcttgatgtttcgcttcaatatcagtaatcaattttttaagcacgtttgcactatatgcacctgctaaacctttatcactcgtgataactaaatatccacttctagtaattttacgaggtcttagcattggatggtttgtattgctacttgcccctgcaactgcagtaattgcatcttgcattttatccatatatggtgtgaattgttttgtatttttttcagctctacgaagttttgaacttgataccatgttcatcgctttcgtaatctgcttcatttttttggttgattttattcgagtatctatttctttaagagaagccactatctcaccaccttatactaaacttgtttattattcagatttgctaaagctttttttgaattcgttaattgctgtgtcaaacttctcagcatctggtaagccaccagtttctctgatttcatttaacagttcagtagcatttgattctgcccagtggtttaactcgtcttcaaaacgtgtgatatctacaactggaatatcatctaaatatccttttgttaatgcataaataatcaacacttggtgttcaactggtaatggtttgttttgatcttgttttaagacttcaacagtacgtttaccacgttctaatttacttgcagtaaattcatcaaggtctgaaccgaattgtgcaaatgattcaagttctctatatgacgctaagtcaagacgtaacgtaccagcaactttcttcattgctttaatttgtgcagatccaccaacacgagatacagattgtccggcattaatcgctggtcttacacctgagaagaataaatcagattgtaagaagatttgtccatctgtaattgaaataacgtttgttggtacataagctgaaatatcaccagcttgtgtttcgataattggtaatgcagtaattgaaccgccacctaagtcatcgtttaattttgctgctctttctaataatctactatgtaagtagaatacgtcacctgggtatgcttcacgacctggaggtctacgtaataataatgataactcacgataagctgctgcttgtttagttaaatcatcatatacgattaaaacatgtttaccgttaaacatgaattcttcacccattgttacacctgaatatggtgcaatatataataatggagaaggttcagaagctgatgctgctacaacaatagtgtagtctaaagcgcctgcttgtcttaacttttcaacatttgctcttactgttgaatctttttgaccaatagcaacatagatacaaatcgtaccttgatctttttggttcaaaattgtgtcaattgcaattgttgttttacctgtttgacggtcaccgatgattaactcacgttgacctctaccaattggtactaaagcatcaattgctttgatacctgtttgtaatggctcatctactgatttacgatccattacaccagtagcttttttctctactggacgtgttttagttgtgttaatcggtccttgtccatcaataggttgtcctaatggattaacaactcttccgattagttcttcacctactggtacttccatgatacgaccagtacgtttaacttcgtcaccttcagtaatacctgtgtatggtcctaaaataaccacacccacgtttgactcttcaaggttttgggctaaaccaagtacgccgttatggaattctactagctcaccagccataacgtcatttaatccgtgaattaatgcaataccatcaccaatttgtaatacagtacctacatcagttacggacatttctgactcataattttcaatttgtgagcgaagtaatgcactgatttcttcagcttttatggccatctatgtcactcctctttataattaattaactcttctaaattttctttgtaattggacaagatcatttctaacactaccatctaatacagttgtgccgactttaactctaaatccaccaattaaatctggattaatttttgtatctacaataactttagataacttcgtttgttgagttactagtttgacaatcttaactaactcttcttgactcaattcatatgttgactcaattgttgcaaaatcttgattgtagtgtccgttatataagctttggaacgccttgaatacgtcagctattaatgagatatgtctattatctgctaacacgtacatcatatttttaatgtatggattaatgtcagtaaatacaccattaatcaactcacgacgttgttctgctgtttgagttggattactgtcaaccattttcaattgctcaattttatcttttactgcttcgtttataactgttaattcttcattaatagtttctaaattatttgtatctaatgacacgtcaaataatgctttagcatacttgttagctacttttaccattatttatcgcctgcctcttttagatacttgtcaaccaatgctttttggtcttgttcagaaatttcttttctaagaactttagaagcaattaacactgatagttcagatacttgattattaatatctgcaatggcacgttctttttggctattgatttcactttgtgctgtttcaatcataccgtttgcacgtacgtttgcttcatgaataatttgttcttgctgttgacgtgcttgaaccttagcatcttctaaaatcttttgaacttcttcttgtgtttctttaagtttttgtttattttcttcttcaagtttctgtgcatttaacttagcttgttctgcgtcatcgatatctctgttaatatctctttcacgtttatccattacatctttcaatggaccccatgcgaactttttaagtaacgcaagtaatacgatgaaagttaggacctgtacaatcacagtaccccactcaacgcctccagctgcaccaagaacgaataagttagctgtttcagtcacgggttcatgacactcctttcattaaaataatcgctagtgttatatagaaaaaaacgacgaggttaggacctactgaatttatgcgataggcatggtgcgttcatatctcaactatttaataaagttcaaagatattactatatatggcatcatgaattatgtcctatgcgctttgtcccgacctcttttatctgttaattatccagcaaatgtcatgaatgcaattactacaccgatgataggtaatgcctcaactaaacctacaccaatgaacatgatacccattaattgaccacgtgcttctggttgacgtgctacaccttcaactgttcttgaaacgattaaaccgttaccgatacctgctcctaatgctgataaaccaattgcgattgctgctgcgattaaattcataatttaatttcctcctgtgattgtatataattattgaaatttttagtgttcatctgccactttatgtgacatataaaccatcgaaagcataataaagatatatgcttggattgttcctacaaatattgaaaatgcttgccaaacaattaatcctgggatactaataatccaaccccatgctggttcgttaaagaataagccagcaagtaatgttaatagtatctcacctgcaaatatgttaccgtacaaacgcagaccaagcgttaatgttgaagtgaactcttcaaaaacattaataattgccaatggccaaaacggctgtacataacctttaagatattgtttcgtaccacgcattttaattccataaaagtgagttaacagtattatcgttgtagacaacgttaaagtcactgttgcatcagctgttggtgatttccaccacaatgtgtgatctttcgttactattgaaaacggaagacctaacatattagctataaaaatgtacagaatcagcgttactgctaagaagtggaattgaccaccttttttccaagccatgttaccttcaatgattcccctcacgaaatcaaaaatccattcaacgaaattttgtttgccagttggtctttttttcaaattacgcgtacaaatgatagcaagtagaaaaacaagaaacgccgtaacaagtatcatcaatatacttgataaattgaaaacgatatcaaaaccgaataaattccaactcacgagcggggatttgtgatccataatctcacctctttcttaatttatttgctcacctttagtaaaggacgtatgataactacaacatatgaaatcattaaaccaataattataccgattatacttacatgcgatttattaaagtaccaaatcatacaggcaataattgcaactaagtatcgccacatatttccagttgaaatatgcatagtgtctggtcttttagctttggctaagtagctctcaaatataacagtattgattgcagaaccagtaacaccaatgattaatcctaagataaatgcatggtgtgtaaaaaggtataatcctcccaatattattaataaatacaaataatattgaatgtactgtttaaaaatgttgtagaaacgactcattttatatgcctccgtgtgactgatatcaatcatgaaaaccgttccactcatacaaactaaatgataatataggcgatttgtggtgtcaattctattcaaattgttgtaaaaaaataagcatgttcagacacaatttagacacatttagacaaaaagtcttttttaattgaaatcgcttggtttttcagtgattaaattcaaataatacttaatatgattaactattctttctgaagcaaatccatcaccgtaaggattagatgcttcagacatttgatgatataatctctcatcatcgattaattcttttgcagcttgatatacgtcttgttcatgcgtaccaacaactttcaacgtaccagcatcaacaccttcaggtcgttctgtaacgcttcgcaatactaggacaggcttattaaaagatggcgcctcttcctgtatgcctcccgaatccgtcaaaataaaataggattgtttagcaaaattatggaagtctattacatctaagggttcaatcaattcaattctgtcatgcccccctaaaatcttatgagccacatctcggacttttggatttttatgcattggatatactaacgctaaatcggtgtactcatctatcaagcgtctaactgctttaaatatattttccataggttgacctaaattttcacgacggtgtgctgtcataagaatgaactttttgtcatggtatttatccatgatgttagatttataattgtcatcaactgtatatttcatagcatcaatcgctgtattaccagtgacaacaacactttctgaatatttcccttcatttaacaaatgcgatgcagcatttttagtaggtgcaaaatgtaagtcagctaatacaccaactaattgtctattcacctcttctggaaaaggtgaatatttatcataacttctaagccctgcttcaacgtgtccaatcggcacttggttataaaatgccgctaaaccacctgcaaatgtcgtcatcgtatcaccatgtacaagtaccatgtctggtttttctaattgaatcacttgttctaattgagtgattgatttagaagttatctcagaaagtgtctgtcctgatttcataatattcaaatcgtattttggtttgatttcaaaggtacttaatactgaatcaagcatttctctatgctgtgctgtaacaacaacaattggctcgagcattttttcttgttccaaagctttaactaaaggagccatctttatggcttcgggtcttgttccaaatatggtcataatctttttcatcaaactacttatctccgattcttctatttagtaccaaacaatctatctccagcgtcacctaaccctggtgtgatatatgctttgtcatttagcttttcatcaagtgcagcaatataaatatctacatctggatgtgcttcatgcatcttttctacgccttctggtgctgcaattaaacacatgaagcgaatatttttagcgccacgtttcttcaatgaagtaatagcttcaattgctgatgcgcctgttgctaacataggatcaacaacaatgatttgtctttcagtaatatcttgaggtaacttagcaaaatactctacagcctttaatgtttcgggatctcgatacaaaccgatatgtccaactctcgctgcaggtactaaacttaaaataccatcagtcatacctaaaccagctcttaaaattggaacgatagctaattttttaccagctaatcgtttagccgtcattttagttacaggcgtttcaatatcaacatcctgaagctctaagtctctagttacttcatatgccatcaacataccaacttcgtctacaagttctctaaattctttagtacctgtatttacgtctctaatatagcttagtttgtgttgaattaatggatgatcgaaaacgtgtactttactcataaaaattactcctatctttgtgtatgtttattgatatagaggatattcagctgttaatttcgcaacgcgttctttagcttgttgtaatttttcttcatctttactatttttcaatgctaaactgatgatttttgcaacttcctcaaaagccttttcatcaaatccacgcgttgttgcagcaggtgtacctaaacgtataccactcgttacaaaaggtttttcttgatcgaacggaatggtatttttgttacatgtgataccaactgaatctaaagtctcttcagcttctttaccagtaagtcctatagacccttttacatcaacagctactaagtgattatctgtaccaccagaaacaattctaaatccttcattaattaatgcttctgcaagaacttttgcgtttttaaccacttgttgttgatacgttttgaaattattttctaacgcttctccaaaagcaactgcttttgctgcaataacatgctcaagaggtccaccttgaataccagggaaaattgttttatctatgtcttttttatattcttccttacataaaatcataccaccacgtggtccgcgtaatgttttgtgtgttgtagttgttacaaaatcagcatattctactggatttggatgtaaacctgccgctactaatcctgcaatatgtgccatgtctaccattaacttagcgtttacttcatctgcgatttctttaaactttttgaaatcaattgttcttgaatatgctgatgctcctgccacaataagcttaggcttatgctctaacgctaatttacgaacttcatcataattgattcgttctgtgtctttatctactccatattcaacgaaattgtagaatttaccactaaaattaacaggcgctccatgtgtcaagtgaccaccatgactcaaattcatacctaaaactgtgtcgcccatttctaatgcaactaagtaaacagccatgttcgcttgtgaacctgaatgtggttgaacattgacatgttcagctccaaacaacgctttagcacgatcaattgcgatgctttcagtaacatctacaaactcacagccaccataatatcggcgtcctggatagccttcagcatacttattagtcaacactgaaccttgtgcttccataaccgcttccgatacaaaattttccgatgcgattaactctatgttgctattttgtctctgaaattctctctcgattgcttctgcgataactttatcttgcttggtgatataagacataaaatctccccttctttcaaaaaaacttattggtatttagcacgttcgccaccaatctttttcggcctagatgtggcaatagttacaattgcctgtcctacttgctttactgaagtccttacaggtacacatacatgtttaatatgcatgcctattaacgtttgaccaatatcaattccacaaggaacagtaatatgttcgaccacgattggatccttcatatgctgaaaagcgtatgttgccaaactccctccagcatgtacatctggaacgacggaaacttcttccattgttaatggattaaactgagatttttctattgttatcgctctgttgatatgttcacatccttgaaaagcaaaagtaacgcctgtctctttactcacaacatctaatgcattaaaaatagtttctgcaacttccatcgaaccgacagtccctattttttcgccaatgacttccgatgttgaacatccaattaaacatatatctcctttattaaaaaaggacatatcttttaattcgtgtaataacattgtcaaatctttcataaaagcccacccttcctaaaaataaaaaaggaatatagcaaagtgctacactcctctattataacttatttaactgttaacatatactaattatacagaattcctactagcaaataatatcttttaattttaaaattaaacttacaagttcttcataggtatgtacatacatttcttttgtaccgccgtatggatctataacttctcctgcttcttttacatattcatgcaatgtgaaaacatgattttgcaaaccaaagtgtgcctctattaattctttgtgcgaatacgacatagtcaaaataatatctgctttcaaatctgcttcagtaaattgttgcgataaggtcgtttcagctaaatgatgttcttcaactaagtcttcaacataattcgaaacaccttgattgttcacagcgaatatacctcttgattcaaattgatgatttggcataacctcttttgcaatactttccgctaatgggctacgacatgtgttacctgtacaaacgaataaaatcttcatagttcacatcctttaataatgtgattacctgcagcttttaacatgcgattcataattgcttctgtattatcattcagctcaaagccgtatatatacgccgctgaaatattttcattttcatcaagtgaatgtaacacatcataaagattatgacttgcttgtttaacatcattgtcatcctgacataattgaatgaattgcgcttcacttggtataaacgccaccttattactcggcacaataaaagctatagaagaccaatctttaccgtcatttccaattttgctctcgatatctgtaataattgtaagtggtgtattgggtgagtaatgcttatacttcatacctggtgcaattggctgttcagtatcattataatcagcatgggcgatactattcggaagtatttctgttatcattgctgctgttatagaaccaggtcttgcaattttataaggaaaagatgtgcaatctaaaaccgtactttctaatccttcttcactttgttcagcttgaacaataccatcgatacgtccattcaaatcttgatatacatgattgaaagttgttggtgaaggtctaccacttaaattagcacttggagcagctagaggttcatttatgatttgtaataattgtctacctacagaatggcttggcattctaacagcaactgatgataaacctccagaaacttttcgacatagatagcctggctttaacggcaatataaacgaaatagggcccggccagaatgcctgcattaacttttctacgcgtggatccaaagtatatgtaaaatcttttaattgacctttactgtgtatatgaacaataagcggattgtcagatggacggcctttagcttcatatattttagctacagcttcttcatctgtcgcatttgctgcaagtccataaactgtttcagttggtaaacctattaaaccaccgtttaaaacaatgtcttttatttcattaattttaggatattgctgtaaatcttcattatattctctaacatcccaaattttagtatccaacttaatcacgcctttcttatttatcataatacaaagcaaaaagctatgcacttaactaatcatagcaaaggcataacttttaattaccatttaaatgagacgattcgatcgtggccatttatatctttaataatgtcgatttttttgtcaggaaatttatttaaaattattgatttaagtgcctcaccttgattgtaaccaatttcaaaaacaactgggctgcctttttccataacgtgaggtaaatcttcaatgattgattcataaatagcatatccatggttatctgcaaacaatgcctgatgtggttcgaatctcgtaaccgttggagacatcgtaaccatatctttttcatctatataaggtggattagatatcaagccgttcaacttgataccttctttaattaagggctttaatgcatcccctgttaaaaactgtatttgtgattgatgcttctcagcattattacgagccatattcattgcttcaagtgaaatatcagtagcaataacatttaaatccggcttttcacatttcaaagtaattgcaagtacaccactacccgttccgatatctacgattgttgcatcatcttctaactgttgtaagaaatgcaacattacttcttcagtttcaggtcttggtatcaaacaatttgagtttacatcaaacgttctaccataaaatgaggcaaagccaactatatactgtataggctctcctaataacatacgttgtaaggctaagtcgaacttcataatcatcgctttcggcatatcatcatgcatgtggactacaaagtccgtacgcgtccattgaaatacatctaacattaaccattcagctcgtgtttgttcaaaccctttttgttgtgttaaatgaattgcttcatctaacttttctttataattcaccattattaagttctttcaatttatctgtctgctctgataaagtcagtgcatctataatttcttctaaatggccttccataatttgccctaatttttgaagcgttagacctatacggtggtctgttacacggctttgtggataattataagttcgaatacgttctgaacgatcaccagtaccgactgctgatttacgttgtgacgcatacttttgttgttcttcttgaactttcatatcgtataaacgtgcttttaacactttcattgctttttcacggttttgaatttgagacttctcagaagatgttgcaatgacaccagttggtaaatgggtaatacgtactgcagagtcagttgtgtttacgtgctgaccacctgcaccacttgaacgatacgtatcgatttttaaatcttcatttctaatttcaatttctacatcttcaacttctggtaaaactgccactgtagctgttgaagtatgaatacgtccacctgattctgtttcaggcacacgttgaacgcggtgcgcaccattttcaaatttcaatttactatacgcgccattaccagaaactgagaaactaatttctttgtaaccaccatggtcactttcagacgcttctactatttcagttttgaatccttgtgattctgcatactttgaatacatgcgcattaaatcaccagcaaaaatcgcagcctcatcaccaccagctgctgctcttatttctacaataacgtctttgtcatcattaggatctttaggaatcaataatattttaagctcttcttcaagatttggaagttcagctttaataccactactttcctcttttaacatttctacttcttctttatcatcagtttcacttaacatttcttcaatatcagctaattcttcttttttagctttatagttacgataaacatctacagttttttgtaaatcagcttgctctttagaatatttacgtaatttatctgaatcatttacaacatctgggtcacttaacagttcatttaactgttcgtatctttcttctacaatatctaattgatcaaacacttataattcctccttattattatcactaggtgctacgatatggtgcgcgcgacaacgtggctcataactttcattggcacctactaagataatcggatcatcgattttagctggtttaccatttattaatcgttgcgttctactagatgaagaaccacaaacagcacaaactgcttgaagtttcgttacttgttcactgacagccatcaatttaggcattggttcgaacggttcgcccctaaaatccatatctaatccagcaacaataacacggtgtccatctgctgatagtttttctactatacttacaatttcatcgtcaaaaaattgtacttcgtctattcctataacatcaacattagttaagtcgtgcgtcataatttcacttgctttagaaatattaatcgcttcaatggcattaccattatgagagaccactttttctttatgatatcgatcatcaatcgccggtttaaatacaacgactttttgtttagcgtatatgccccttcttaaacgtcttataagttcttcggatttaccgctaaacatactacctgtaatacattctatccaaccggaatggtaagtttcatacattgagagttccacctttttcaaaacataatcgctttattatatcatatttcaaatattcataaatgtctttttcataattatatcgatattgtacatgaacaattattttataaatttgtcttgcatatttatatacagccattctattttgttgcttcttattcgtgcgatgtttctactcaatacaaactttaataaagggaaaaatttatcattatgtattaacaacatgttattgagtcacttctttgaacacagtcgtaagtaaatacccttactacacttataaataaaaaagctgtctacaattccattataggaagcagacagcttaacgattactatattagttgtttgatttaagaccaaactttttgttgaaacgttccacacgtccatccgcagcagcgaatttttgacgtccagtgtagaatggatgtgaatcagatgaaatatctaaacgaataactgggtattcttttccatcttcccactccatcatttctgaagatgtttttgtagaaccgcttaagaatttgaagtttgtagtagtatctaaaaagattacttggtgatactcaggatgaattccttgtttcattattttcagctcctttgccctgaaccatctggaacagagttatttgtgagtttttacccaatactgtgtaattataaaggtaattaattcaaaacgcaagcccctatataatgtttattaaattataggtcgacccgttttagtactttcttctgcagacttttgtagctgcttgaagaaatcttcattattcttagaccttttaagtttgcgaataaatctttcagtaaagtctgttgagtcagtgaatagatttcttaattgccataatgtgtctaattcagatttacttatcaacaattcttctttacgcgttgaacttctgccaatatcaattgcagggaagatacgacgttcagacaatttacgatctaaatgtaactccatgttacctgttcctttaaattcttcgtaaatcatatcgtccatacgtgaacccgtatcaactaatgcagttgcaagtattgttaaacttccacccgcttcaatatttctcgctgcaccgaagaatgcttttggtttgtgtaaagatgcaggatctaaaccacctgataatgtacgaccacttggtggaataactaagttataagcgcgtgctaatctcgttatagaatccattaaaataatgacatcttccccaatttctactaaacgctttgcacgctcaagtaataattcagctactttaacatggtgttctggtggttcgtcaaacgttgaatgaacgacttcagcagcttctactgagcgttctaaatccgttacctcttcaggacgctcgccaactaacaaaataaatagctttgcatctggtttgttcgtactgattgcattcgctatttcttttaataacgatgttttacctgctttaggtggcgccactattaaaccacgttgacctaaaccaatcggtgttactaaatccatgatgcgcgttgaataattttgtgtttctgtctctaatttaatacgctcatctggataaagtggtgtcaaagcttggaaatgcggtcgtttcttcacttcttctgcgttatggtcattgacaaagtcaacttgtaataagccataatatttttcgttatctttaggttttctaactttcccagttactttatccccacgtttaatttcaaaacgacgaatttggctagcagatatataaatatctttttcccctttagaatagttcactgttcttaaaaaaccataaccatccggttgtatatcatctaagataccttccatataatagttaccatctttttccatttgtgcttccataatagctagaacaagttcttttttatttaatttactatagttcgtcaacttaagagttttagctttttgagtgagttccttggtagtatagttcttgtacaattcgtggaatgattcatactgaggagatgtacgttctctttcaggcatatagtttacacccatttcattattttttagttagtaagtaatagataggcatgacaatgcataaataactgtgctagcacaatcccattatgctaatccccaaccttttaaatacatgaataactatagcaaattttcattttaattacaaaatctatttataaaaattgcaaaattaaaacagtacacaaaacttaattagtcatgtgcactgttttattgcgatttttaattcaaaaatcaaatttatttaaaatagccagctatagatttcacttctaagaactcttcaataccataatcgccccattcacgacctaaaccagattgtttatagccaccaaatggtaagtctggctttctacctgcttcgtttatttctactgtacctgcttcaatagaacgagctactttatgcaatgtttctttgtccttaccaataacatatcctgctaaaccatattttgtatcatttgcaatttgaatcgcttcatctaaatcgttataagtgataactgacattactggcccaaaaatttcttcttgtgctatcgtcatttgattatctacattaataaaaattgtcggacgtgcaaagtatcctttttcaagtccttctggtttaccaggaccaccataaaataattcagcaccttcttcaatacctttattaatataattttgtacttgatcaaattgttttttactaatgatagggcctacttgtgtaccatcttctcttggattaccgacacgcacttggctaaattgttcttttaattcagctaagaatgcatctttaattttgttaggcactaaaacacgtgtaccagctgtacatacttgaccagtattattaacaactttgcctgttgttgctttagccgcttctttaatatctacgtcatctaggacgatgtatggtgatttgccaccaagctctaatgatacctttttaaaatctttagcagctttttccataattttagaaccagtagggcctgatcctgtaaatgacatcatgcgtactttaggatgttcagataaaggattcccaacgcctgcaccatcaccattaacaaggttaaatacacctttaggaacaccgactttatcaaaaatctcagctaaaataacagctgcaaatggtgtttcttcagatggtttaagtacaactggactaccagccgcaaatgctgctgctaattttaatgatgtttggtttgtagggaagttccacggtgtaattaagccagatacaccgattgcttctttaacaactaaatcatctccgcggcgttcttcaaattcgtaattatctaatgcgtctctcgctgcaacaaaatggtttagtcccatttgataatggacacgctcagataatgataaaggagcacctaactcatccgtaatagcttgtacaatatcgtcttttctgttttcatattcttttacaattttatctaataacgcttgtctttctttcacagatgtatgacggaactctaaataaacattgtctgccgcctcgacggctttatcaacatcagctttattacctttagcaactttcccgattacttcttcggttgctggatttataacttctatcgtttcattactattactttctacccattcgccattaatgtattgctttgtgtagtctctcattattctttcactcctcaagaatgatttatatattatttatccgtaatgcatacgatataaacattacattccattatgatacgctcccttttaatatgttcaaaataaaatgctttaaaattttgctgcatctaattttttatatttttaaataaaaataactattcccacatcatcgcaaataatgcgaagacttagaaatagttataatcaatgctatgtttaaacgtcatgtaatcatttagcagtacgttgatctgttaaatcgacatatgattgcgcccatgcttcaattggatgtaaagcctctgctaacgctttacctttttcagttagcacataaataatttgtactggactcgtagaaatgatttgcttctcaactaactcccattgtgcaagctctgacaacttaagacttaaagcacgtggtgttattgttttcaaatctcttttcatatcggaaaagtgtgctgaacagtcattacatcttgagagataattaatgattaatccattccaacttctaccaagtattttaaaagtttcttcgagatacggacatacttccatcatcttcacctctcatcaataaatttagaatgtaaacgaacacccttttttaatcagtataattattataccacaaaacaagataaatctatacagtttccgtccaaatatctgcacctaaagcttttaaatgttctacaatatctgtataacctctataaatatgtttaacattgtaaattgtagttacaccctcagcaattaaaccagcaataattaaacaagctcctgctcttaaatcgctagcataaacttcagcaccatgtaatgttgatggttttatcgttgctgtgccttcgtcaacttcaatatttgcacccatgcgctttaattcttcaacatgtttaaaacgctccggataaatcgtatcagttacaaatgaaggaccatttgccataaataataatggtgtaataggctgttgcaaatcagtagcaaaacctggatatactagtgttttaatatcaacaaatcgatatggcgcattattattgatgcgaattctttcgtctcttacatcaacattcacacctaattcactaaatttagcagttaatgtttctacatgtttcggaacaatattatttaatataacattttctccacatgctgcagcgatacacatatatgtgcctgcttcaattctatcaggtataacttgatactcagaaccatgtaattctttgacaccattgattttaattgttgatgtacccgctcccttaatattagctcccatacttgttaagaagttagcaacatcaactacttccggttctttagcagcattttcaattacagtttgtcctgttgcataaactgcagctagcataatgttaattgttgcacctacgctaaccatatctagaaaaatatgtgcaccttttaactctttagcttcgattttcattgatgtcgtacttgattcatcaatttcagcacctaaagctttaaatcctttaatatgttgatcaattggacgtggcccaagtggacatcctcccggtaaaccaatcacacattttttaaatctacctaacatggcacccatcatatagtatgaagcacgtaatgattcaactttattatttggtaatgcagcattttgtatttcagttgtatcaacttctaattccgtaccatttagtgatgccttaatatttaaatcttctaataaactcactaaagttttaacatcagagatttgcggtaacccttctaatttcacatgtccttgagctaataatgttgcaggaatgatagctacagcactgtttttcgcgccactgatattaacttccccatttagtgtgcgtccacctcttatttttattacctcttgagccatatcatttatctcctttgtccattactttttaattttttgcattattagcattataaattaattttactttatttgtaaaatagtttattttaatcgttaaaatcttgtctttctattttcgattgattaataacaaatcattcacctttactaatatatgctgttcttccccacttgaccatggtctaaagtctgattattcaactaaatattgacgttgttttgacaattatttagttttaattctacggttttcacgtaaacttttttcataaattgctcattttccttataattatatcacaatcaattttgatatattttaccatttttacgctttcattttaaaatcaaactgttttatttattacttatacaacataaaaaagaagcaaacaccattttgtctgcttcttttaaaattaatatccctacgttattaataacttaaagactaaatattaattatttagcgcggtttgaagtaccgaactctttaattttacctttaactgtttctttgatagcttcacgtgcaggtcctaagtatttacgaggatcgtaaacttctttgtcgttatttaaaacgtcacgaactgcttttgctgaagcgatttggttttcagtgtttacgttaattttagctgtaccaaatggaattgctttttggatatctttagtcgggataccagtaccaccgtgtaatactaatggtaaacctgtagataaaccgatttcttccatttctttaaatcctaattttggttcacctttgtatggaccatgaactgaacctaatgctggcgctaatgcatcaataccagttttttcaactagttcttgacattctttaggatcagcataaatgatgccgtctgctacaacatcatcttcttgtccaccaacagtacctaattcagcttctacagaaacacctttttcatgagcgtattcaacaacttttttagttgttgctacgttttcttcgaatgggctgtgtgaagcatcgatcattactgatgtgaaaccagcatcgatagcttctttacatttttcaaagcttgaaccatggtctaaatggattgctacaggaatagtgatgtttaagtcatgcattaacccttcaaccattttaacaattgtgtagaaaccgctcatgtaacgagcagcaccttcagaaacacctaaaattacaggtgcattttcttcttgtgacgcttctaaaattgcttgagtgaattctaggttattaatattgtattgacctaccgcataaccattttcttttgcatcaattaacatttctttcattgaaactaaaggcatgaaagttcctccttgagtgcttacgcacgtatttttcaaagtaattatatcaaaaaaatagcgtcaatgcattgaaatactgcagattaaatgtgtattttttgaaaaatgcgatagttatactaaatgcaaacgtatacatttttatacaatttaagccgttgcataatatgtagtcattaattacaatattttataagtagattggaggataaagatgtcaaaaatcttaaacacacaactaataggtatctttaataggctagaaaaacaatctttagaaattcaaatggccgcccaatgtttaattcaagcaattggtggcgaaggttatgtttatgtaaaaggttatgatgatttacagtttttcgaaagtttcattctacatagtgatgagcgtttaaaatctagccgaaaacttgacgctattaaagactttaaagaaattgactcaactgatcgtgtattattattcgcaccattttataatgatcaagttgcattagatattcaaaaacttatcgccttagatatcgatgtggtcttaataagcaacaaacctaaaacagatgatttccctgatcatctcgtacattttatcgatttatctacaccaagacctatagtctatactgaagattacgataagattgtccagccacatgcgatggcattgaattatgtatactatgacatttatacacaaatgattgaaatgacaagagacttagaattataaaagtcactattgttatttaataccttgtcactaacataatattaaaattataagaaaaaccggtactttcaatgtttaacaatgaaagtaccggttttattagcaaatttatttattttgttgatattttaatgaagcttcaatgaatgatttaaaaatcgggtgcggacgatttggtctagataagaattctgggtggaattgacaagcaataaagaaatcatttgtcggaatctctaccatttctactaaacgtccatctggacttgtaccagaaattaccataccatttgcttctaattgttctctatagtcattattaaattcataacgatgacgatgtctttcttcaatttccgctttaccgtaaacatcttgtgccaatgtgccttctttaattgaacatggatataagcctaagcgtaatgtaccacctaaatcttcgatatctttttgttctggtaataaatctataattgggtatggtgttgctgggtctaattcagctgaatgtgcgccttcaaggcctaatacgtttcttgaaaattcaactgttgcaagttgcattcctaaacaaataccaaagaatggtacattgttttctctagcatacttaattgcactaattttaccttcacttgcacggaaaccaaatccacctggtactaaaataccgtcgacatctgcaaggtattcggccgcattttcatctgtaacttcacttgaatcaatccatctaatatcaatatctttagcgaaaggatatccggcatgttttaatgattcaactacagataaatatgcatcttgtaagctaacatacttaccaactaaaccaattgtaattttaccatccaaattattaacgatatctaacaactgtttccattcatcaagctgtgtttcatatttcgcgtttaattgtaaacgtttaataacgatatcgtccatattttgttggcttaattgtaacggaatttcgtataaagaatctgcatcacgacattcaataacactttctttattaatgtcacagaataatgcaattttatcttttaaatcttgtgtcatttcatattcagttcttacaacgattaagtctggttgaatacctaagcctcgtaattctttaacgctatgttgtgttggcttcgttttcatttctccagcagctttaatataaggcagtaatgtacagtgaacatacataacattttctctacctaaatcgctacgaatttgacgaatcgcttcaataaacggtaatgactcaatatcacctgttgtaccgccaatttcagtgataacaacgtctgcattcgtactttcccctgcaagtaataaacgttctttaatttcatttgtgatatgcggaataacttgaactgttccgcctaagtaatcaccacgacgttcttttttcaatacgtgtgaatacactttaccggctgttacatttgaaaacttgtttaaattaatatcaataaatctttcgtaatgtcctaagtctaggtcagtttctgcaccatcatccgttacgaatacttcaccatgttgataaggactcattgtacctgggtcaacatttaagtatggatcgaatttttgaattgttacatttagacctctatcttttaataatctacctagagaagatgctgtaatacccttccctaatgatgaaactacgccacctgttacaaaaataaattttgtcatgtcttgacctcctaattattaaagggaatgcttcctcatcaattgtaaaaattacgtaaaacataacatttgagtaagctcattcaagttgttcatttgtcgaattcgacaaaattaaattctgtttacttaccgttttcatactgctatgtcactatgtatatcatttacaactttgattattgcgttatcatttcttgatttactcaattaaataaaaaaacgctccctctcacaaattttgtaaggggagcgtataaattttatacacgtgtcctatttaaaggagcccgaataaaattttatcatctttcaactaaaagtcaaacaaaaaattaatcgttgaagtcttcttcgtcttcaaacacttcttcatcttcgtctagttcatcttcatcttcttcaatgactatatccgaatgattgatttcttcttcaacctgctcatcttctggatcatttagttcttcttgatcatctgtttgagctggaatatcatcgtcgtcatccatttcatcttcgcccaataattttaagttttgatcttcttcatcatctgcatccagaatatcgaatttttgaatagttggtgcgattttctcttcaatatcatctaccgaataccaatcacgtaatccccataaattttctccaacatttaaaaaacgaccatctgtgtttaaatctgtgtaaaattgtacaacgcgattttcaatttcttcgtactcataatcacctaacgctctaaactcatcgatgatatcatataagttcatagtttcgcctttatcattcaataatgtataagccatatcaataaatgatttttcatcaaccatttgttttgtataatcttgaattttcattgcccaatacttcctttcgaaggatataatctaaatttatacgtctgaattcatttatatatagtaacaaaactaaattataaatgacaatatcatatttcgcaatcactgttagtaatttaaatatttttcaaaaacgacataatcatcagtttgttcgatttcaacgaaattactatttaaacataatggtttaaaatcattattctctccaaacagaatcatcgtaatcacattaaggttgtcatagttttttcttaagtaagtaggcaattgtcgaagcgcacttgaaccaataccattaaagcgatatgatttatccacttcaatagcagcaatgttcatgcgttcaccaatctgctccaatgcgataaagccaaccttttggccatcaatcattaaattaatgatatgtacattggtcacttctgaacgactttcttcttcaagctttaatgacgaaacatgttttgaatctaagtccaagtaatatagtcgttctttgccaattggtccttcttctttagtcgctgtatgcatgaatccagcacgttcgtataggttccaagcattgtcattttccgcatctactactagatatagatgattaaaatcaggaaatacaccttgaacatattgcggcaatgacatcattattttcgtgccatatccaaaaccttgatatttttcattaatcgataatgaacgaatataaacgacattttcaggtgtatcataaccttcatgctgatagtaacgatgtaatacaaaaaagcccaccacttcatttttatcgtttattgctacgttagcaatcctatcagcatcattaattgcatcatcaataacttctttaggtaaagatgaatatatttgttgtctttcattcaagtcaaaatcattaattgctgaacgatattgttcatcaaatgcttttaaagtgataccttcaaaacaaagttctttagccatatatttaacccctatctttttatatatgaagcatgaatccccatattattttacctattatttcactacgataccattatttgctctaagttaaataaattacttatttatattttttaaatttcaaaattaatgtgctattcctcattacttatcattttaatcagagacttacaaatacactgcgtacgaactacttttaatattgcgtcactaactaacaatcctatacaacttcaaaattcctagaaaataatatatataacttaacgtctacgtttgtaatacattaattgcgatacgcttacaatgttgaaatacaatggcatcaaatttgttaataattactattattacttgttttttagtcattttactatactattatttaaggatagacattaataatgaggtgggaatcttatgaaagttggcattgacgctggcggtacactaattaaaatcgttcaagagcaagataaccaacgtacttttaaaactgaattaactaaaaatattgatcaagttgtggaatggttaaaccaacagcaaattgaaaaattatgcttaactggaggtaatgcaggtgttattactgaaaacatcaacattcctgcacaaatttttgtagagtttgatgctgcatctcaaggactaggtattttgttaaaagagcaaggccatgacttagcagattatatttttgcaaatgtcggtaccggtacgtcactacattatttcgacggccaatcacaacgtcgtgtaggcggtatcggtacaggtggtggcatgattcaaggactcggttatttactaagtcaaatcactgattataaacagttaactgacatggcacaacacggtgatcgtaacactatcgatttaaaggttagacatatttataaagataccgaaccacccattcccggtgatttaacagcagctaattttggtcatgtactacatcatttagatgctgattttacacctagcaataaattagcagccgttattggtgtcgttggcgaagttgttacgacaatggccattactgttgcacgtgaatttaaaactgaaaatatcgtttatatcggttcttcatttcataataacgctttattacgcaaagttgtggaagattacactgtgttacgcggttgcaaaccgtactatgttgaaaacggcgcattttcaggtgctattggtgcattatatttaggaaaatagaaaaagaccatttatatgcgcgttgttttaaatagacgctatataaatggccttttattttatggtctaagtgttttgaatacgtattgttccatttattatcacttaattacaactcaattcagttaaaatgtaagttcattagacaatttttgcgctgaaacaattgtaccaaccacgccagtttttaaatctatcgcaacggctttatgatcatctctaagttcatctagccattctccgaaaacagaaccttcaatcgtaattaaatcacactcttcaaaatcttcatctcgaacttttaacgctctgtttttaatactccatacaggcataatatgcggctttttttcgtcgctatcattttcactaatgagaataaactgcttactaccttttttagttaagccgtatacttcatcatatttcgctacatcttggacaaattctttgattctaattttatctaattccgtcatcacttcttgtgtaacagctacaacgtttagtagatgcccttcttcttccattgtttgattcataataatatggtcttgttcatcaaacaattcatctaattcataagtagcaaaacgatcaacgtccatttttacaactttatcaaatggaatatcacgacttgttaaaaatgatacggccacactttcttctgtccaaacgcctacatacgcttcacttttataatttaggcgtactagttttttatttttagaggcgaaataaatacattcatttattaatatatctctaaagaatggatatgctttataagacatgcttgaccctcactttttaaaatatgtcatacataaaatagtaaatgactccaacaagttagtcaattagacatattatgaattcaatttaatgtcatgtttttcattttaaaaattcaatagcattaaattttacgtatacacaaattcggtctataacacgaaacatatctagttactaaaaatttcaaaacgaaaacctttagtatacctttatcaccaaaatggcaactcttataacatagtgaaataaaagtcgccatttaatattagtattacaaagtattgccatatcataaatttaattactgttgactagaatcgaaaaaagcttgttacaaacgcatattcagtcaactactggcaacacaacattgtagcgccttatgttccgaactctaatagtgttcaagttcagctaaaaatgcgcgttcattctccagtactgtttcttttgaatcaccatgccaaatacagccaaaccttgatttaactttatcttcaccgtaccaatcaccatcataataagataacgggtataaactaccttctttgacatatttcaaaatcgtattgaagaaatgtgtgttatcaccttttgaatgataactataaaacttttgatatcctgaattcaactcgttagcaagtaataacatgctcgttgaaccattttgtctaaagtttaaatcaattgcataaacgttatcatcctcatcgacgagtaggtcaaaaccagctacaccaaagaatccttgattcacaccgttttccataatttgtctacctgcttctataacgtgctctggtacattagtagtattttcatttccgttataaaatccgtacttatccgttaattgcgttgccgcaccaagatattgaatacctagcgattccgagtatgcaaactgaacgcaataattcgctttttcttcaatcttctgttcgataataagcgaattcgtttcagcagttgcctgtttaatacgcgttatcgctttttgtaaatctgcatcatgataacaaatcataacgccatagccacctgctgtcggaagatcatctcccggcttaattacaaacgggaattcccaattcttaatctcgttttcgaattgctcaatttttacaacttttctttttggtaaaaacttcccatttgtccattcaggtattcttgctttattatttaaagcaacaaataacgttttatctaatgcataatattgctgattcaagattgtttcatcatgaatatattgaaaataaatctttttattttccttatgtgccaattgtttaatcaagttttcgtaagattgctgattgttaaatgtataaattgagttcggtacttccttaccaataacttgaaatagctgatgcaatttgtctgtcgcactagcttcgtgaacaataacaggtaattgatttgctattaataactccctaccagttaaaaaattagattgatgttcgtccggtttcaaccatggattcgatatatacgaaggtcttgacgtatagacaacatctttgtcatataaatcacttaacgttaagttcggctcattaccattatttgtcattacttcccattccctttcaaatgcgcatgctcttcaataatgtcttgataaacgtcttgatttgtaattaactctaaccccatcaacgccattattttagcacctttaattaatgcttcatcaccatgtacactcgcagctgcttctctaaatctatgcgtatgtcctactaaattacgtgatcctattttaatatgaggatgtattgttggcacaacatgacttacgttccctgtatccgtagagccataaccaaaatcatcatcaataactgcttcaccaacttcttcagcatatttagcaaataaatcatctaatttcggcgttttaatgaattcattcacaccgttttgaattggaccaaattcataatcacaaccagtctgtatcgcagctccacgtgcgatttgatttactttttctgttaatatatccaattctttacgcgtcattgctctagtataaaaacgagcatgtgtatagtctggaataatattagctgctttcccgccatctaaaatcacaccatgcacacgttgatcttttttaatatgttgtcgtagttgtgctacaccattaaaataactaatcatagcgtctaatgcatttaacgcttcatctgcattttcagaggcatgagcactttttccgtaaaatttaacatctaaaacatccactgccaaagtatcaatcgttttataagtttcatttcccggatgaatcattaaggcaatgtctatttgatcaatcacaccagccttgacataagaagctttagcgctaccattttccccaccttcttcagctggacatccgagaacgactactttaccaccaatttggtcaatcacttgcttcaaaccaattgcaccaagcacacttgcagttccaatgatattatgaccacaagcatgacccaatcctggcaaagcatcgtattctgctaaaaaacctatagctggcccgtcaagatccgaatcatatgtcgctataaacccagttgcatgtccagcaatctcggtttcaatttcaaaatcatgttctttcaaacgatctattaaagttcgagacgcaaatatttcttcattaccaagttcaggacgttcatgaattctatgactgatttcgatataactatatttatttgtttctatataatcgagaatttgttgtttttcactcattttttactatctcccttttaccctacactcattttaatcatccacaatattttgttctttcaaaatgaattattacttattctatcggttttatctcttgatgtcatctagtttttctttatttacaaaattttctaataactaaaagccttcataaatttataaaacagtttcaaattgtaaaacataagccctattgttacaatttaagtattgttagaaacgcaacttgcaacaaatttaagtttaataatgtaacgaatcataagcgttttatagttttgagtagttaataggaggaaatttaaaatgacaaaaatgaatgttgaaagttttaatttagatcatactaaagtggttgccccatttattagattagcgggaacgatggaaggattaaacggagatgtcattcacaaatacgacattcgtttcaaacaaccaaacaaagaacatatggatatgcctggattgcattcattagaacatttaatggctgaaaatattagaaatcatagtgacaaagtcgttgatttaagtcctatgggttgccaaactggtttctatgtatcatttattaatcatgataattatgatgatgtattaaatattgttgaagcaactttaaatgatgtgctaaatgctactgaggtgcctgcttgtaatgaagtacaatgtggctgggcagcaagtcattcattagaaggtgctaaaactatcgctcaagcatttctagacaaacgaaacgaatggcatgatgttttcggtacaggaaaataaatcttagtcaatcaagttaatcagaaaagcagtcgaacaatgatgttacaatcgccattgtccaactgctttttattatgcttcaaagtcaaaaaatcgaacaaatgaaaaagtaaaatctttaacatttgtccgatttatttgagaaccactataatttcttaattagtcccattaacacgaactgcataggtaaccttaaatatagttgccatgttggcaattgtttatctcctaaaggtaactttttaactgccatatagatattagctgggaatacagctagcaagaatagattgattgtatttttcaagcattgagatggtcttttaattaaaagtgcaagtccaaataatatctcaaagattcctgtaacaagaaccgctgtttttcgaagcggcaaacatttcggtatgatatttctaaattgtcgttctcgtgtaaaatgcaatacacctattatactaaaacctattcctaataaatatcttagtatgttcaatcagcttcaactcctactctgtaattattttatgaattaatgtaggcgatacaacataatcagcaattgttatgcttgaatctaattttttaacaacatcgtctacatcttggcgattactgtgaatcgttaataatgattctccttcttctactttatcaccaatttttttatttaaaacaataccaaccgctaaatcaatatcatcctcttttgttaaacgtcccgctcctaacatcatcgaagcgacacctatatcgttagagactaactcagtcacataacctgattttttagctttatattcgatttgatattgagcttgtggcaaacgctctggatggtcaataactgtttcgtcgccaccttggtttttaataaatgttttgaatttttctaatgctgcacctgaatcaattgcctcaattagcaacgctctcgcttcttcaagcgtttcagctttgtttgcaagtacaaccatttgagaacctaatgttaatacaagttctgttaaatctttcggaccttgtcctttcaacgtatcaattgcttcttgtaactcaagcgcattgccaatcgcacgtccaagtggctgattcatatcagaaataatcgccatcgtattacgtcccacattattaccaatacgtaccattgcgtgcgctaatgcttcagcatcttctaatgttttcataaatgcaccgctaccagtttttacatctaatacaattgcatctgcaccagcagcaatctttttactcataattgaagaggcaattaatggtattgaattgacagtaccagtaacatcccttaaggcatataattttttatctgcaggagttaaatttcctgattgtcctacaactgccactttattttcattaaccaatttcacaaatgttgcttcatctatttcaacatgaaaaccatcaattgcttctaatttatcaatcgtaccacctgtatgacctaatccacgcccactcatttttgcaacaggaacatctacagctgctactaatggtgctaaaaccaatgtagttgtatctcctacaccacctgttgagtgcttatctactttgacacctttaatatcactcaaatctatcatatcaccagaattaaccatagccatcgttaatgctgcacgctcatcatcgttcatatcttggaaataaatcgccattgctaaacttgacgcttgataatcaggaatatcccctttaacatagccgtcaataaagaaattaatttcttccgttgttagtgtatgaccgtcacgctttttctcaataatgtctatcattctcatttttatcatccttttcttaaaaagcttaggacaaagcatctgcgctttctctagtccatttttaaaagcacaagcgaaaattattatagcaagctatcgatttcatttttaatatcacaatttaaatgcgatgttattattcttaaatagattggttataacgtcaaagtccctattaaattatcttagaatcatcatggcatttatgatgtcttaaaactgatatcgacatacttatatatggttacgatgtcccatgcttacatattttttataaaattagtaatctgaatctgcttctaaaccttgcataatttgaacacctgcgctcgcaccaatacgtgtcgcacctgcttcaaccattttattgaaatcttctaaattacgtacgccacctgatgcttttacttctacatcagcacctactgtatctttcattaatttaacgtcttctgcagtcgcaccgccacctgcaaaacctgttgaagttttaacgaagtccgcaccagccgcttttgttaattcactcgcttttacaatttcgtcatggtccaacaataccgtctcaataatcacttttactgtgtgacctttcgcagctttaaccactgcttcaatgtcttgttgtacatcatcaaaacgcccatcttttaatgcgccgatgttgatgaccatgtcaatttcatctgcaccattttgaattgcatcttctgtttcaaatgctttcgttgcagttgtcgacgcacctaatgggaaccctattaccgtacaaacgagcacacctgaatcagctagtcgctctgctgcatattttacatgcgttggattcacacatacagatttaaaattgtatgctttcgcttcatcgatgatttgatcgatttgcgtacgtgttgactcaggcttcaataaagtgtgatcaatcaattttgcactattcattttctatctcctcctttatggttgattataaaaatacggttgtaaattagttgattgagcgtcaggttcatttaaatatcaggttagatgttcgctttttatgtaaccgcatacatatactattacattaattcatttcccataaacaaacaatacaattgaacgtgatatcttcattatgaacgatgacttgacaacaagctaatcgggattatatttttataattctttaattctatagtacaaaaattcgcaaaaaagggaaacaaatgttatcttaaaattattaatgaatattaaggagaagataacaaatgacaaaaggtacaccacatattcaaccaaatggagtaaaaattgctaaaacagtattaatgcctggcgatccgctacgcgcaaaatatattgctgataattttttagaaaatgttgaacaatttaacgatgtacgtaacatgtttggttacactggtacatataaaggtaaagaagtttctgtaatgggttctggcatgggtattccaagtattggtatttactcatatgagttatacaacttctttgatgtagatacaatcattcgtatcggttcttgtggcgcattacaagaaaatgttaacttatacgatgttattattgcacaagctgcatcaactaattcaaattatgtagatcaatacaatattccaggtcatttcgcgcctatcgctgacttcgagttagtaactaaagctaaaaatgtcgctgaccaaatcggtgctactacacacgtaggtaacgtattatcttctgatacattttacaatgccgatccaacattcaatgatgcttggaaaaaaatgggtattttaggtatcgaaatggaatcagctggtttatatttaaatgcgattcatgctggtaaaaaagcacttggtattttcacagtaagtgatcatattttacgtgacgaagctactacacctgaagaacgtcaaaattcatttacacaaatgatggaaatcgctttagaaatcgcagagtaacttatttaaattgagtttaattgctctttaacaatgcgattaaactcaaaaagccaacacattctgggcgtatccccatttatgtgttggcttttatttatattattacttatctgtagattagcttaagtaagatttaaacatccaattatgtttatctactgatgtttgcatacctataaacatatcttctgatacatcatcgcctgcattaccagcaatttcgattgcgttttctaattgttttgagatatttgtgaagtcttgtgataattcttcaaccatttgttctgcagagtaacctttcgcagcttctttaacaattgattgctctaagcattcagttaatgtacctacagggtttcctcctaccgctaaaattctttcagctaattcgtctacatattggcttgcttcattatataattcttcaaatttaacgtgtaatgagaagaagttaggccctttcacataccagtggaaattatgtagctttgtataagctactgtccagtttgctacttgttgattcaattcttttacaacatcttgttgattactcatatttaatacactccttaaaattgtctacgtcttgcttgtttatattaattattatattataatgattctaatctgtaaagtgtttttactctcttttttataattattctaatctatctgttaagtgttccgctttttaaatatctaaattttaattcatcatctagtatatctattatcaattagaaagtatgttttatcaatcagtaagttttactttcgcattatcatctaaaaagaacgatttttcataatcatttggttggtgccatgttgttttccacattctatttctattatcagcaaacattcgataaccgaaattacggactggtttaggtacaagccataaacctacgcccaataatttagttcgattaggtagtgctgtgattagtttaataatcgcctgcgattcaaaatatatacgatcacctttctgtaaaatcacactatttttatttgccgcttctggatgttgtttaaaaaattgttgtccaacttcaccttttaacgtggtaaattgataatttcttggtaggtcatgttgaattaaccagatgacatagttataacaatatatacagtttccatcataatatacgattggcataatttattcgctccttcaatagtacttatagtcatttttcctaatttaaaaacatttaaacaaggttgtcacttgataagtcctcgcgacacgaaattgccataaaatttatttttcagttttgtatttattgtataatgcattttttatttactttaaatttctcaatctacagtgtaatcttatttcttattatcaacttagcgtttagtcgtttgtcttattcaacataccactggaaaactcaaataaagttttaattcagtaacataaattcatttatattcatatactgtctttattatttattaaaataaaaacgagtaatctatcataagctcttaattagctcttatggttgattacccgtcattttttctttatacggttattcaaatatgcaatttttaatctttccttacttcttttcaaaaactaccatatattattagtcatgtttgactttgactatacgtgtgtattttaaaaactgctctgaatatttctccttaatttcctctaaactatcatatgtaatacctacaatatgccaattaggattgaaataatagaaagaatctttttgtcgtgaccatttaatcatattaccgtctttattataacgtggtaatgttacctcatagccttctaacacattaatatacgtttggaaaatgtctgtatctatacgattaaaattatcaataactaaataacttttatcctttttaggcattaattgagtaataaatccttcacgatagtataatgcccctgtttcatttggtaaatacttgccataaagcatatcttctgaaaaatcaggatgacctgttgttataacaggatttgcattcgctttttgcaataagtcattagccgcttttaagccttcctcttttcgatctacaacaagtaaaataaatggctttaacgcttcttctttttcactttcaagcatatctggtttttgaaccatttcaaatggagatttcaatccattattatcgctcatttcaataattgcatcatactgtgcttgtgacatacttgcaatagcctgttttgcattttcttgaaggaaatataaatttttcaatttaggatgcttatttaatgtacttaatgtaatcggcgtaatgtctttctcataagacacttcaatcactgtactatttgttctaccaggaattggtggtttttcatgaatatgctttgatacttctccaattccaacgacagattgatttttcgttcgattataaaaaataatattgtcgccttcttctaactgagtataaaaatgataaccattacgtttaataccgttgtacgtgtgcgtataaatcgtatattggtttccaggttcaaattcttcagtttcagctaaaaagaaataacgtggtatcttaatttcgcctttaccaagaccacttattaaatcaaactcttctgcagtgatttggttgaacaatgtctctttcatattactcatacgaaattccaaagcttcactacgctttaaataatctgctgttaatggtttcaattgttcattaaaacgaaactgtacacgtattttattttgtgcacctgtttcaacactaataatttcaccacatccaagtagtccagtatccgtctgaacttgataaaagatgacttgatctcctactttagcctttttaaacgctctaaatccttgagatggattaaaatgtgcgcctgattcaaataaagctgtttgtcctactaacggttcattatgattccaacggttatatccacaattcaaccaaaaataattcgtttctgctgtcatcttaatactccttaacctgaataaattttagaaacactatgaattacattcttttaatgtttcttatgcagttgggcgcgtatacgatcaactgtatcccctttgttcactacgattttaatcgcatttcctataacattgtagcgcctaggacattaatttacgtcccagacccttatcgttttcacttctaagtaagtcgaactattttgctttacaacaagtgcgactctatatgcagttggacacacacatacgagcaactgtataccttttaatcagttttctatattttatttattatatatgtcttaatgataaaaattgttacaaacagtttaacatatttagctacctattttgcatataaaaaacatgcttgcatacactatgcaataaaaattacaaaattatatatgataccactatgcttgcttatctctatagcgccattgatacgcatttttaaatatctatacgcctttagaattttagcatgtcttaattttcattaaatattaattacttcattttatatacaccaacaaaaaccccctcactactatgcaagtgagaggttatgttgatgtgctttattttcaacaatgtcattaacacaatcatatttctgctgttaatgcactgtactatattcaaacgcgctatcgactattaatttgaagctacaaaggtaccgcataatggcagcacattaattaacaatgcgctaaactttaatgaggcgctgatttgcttgtctttaaaagtcaacatagcactgataattcctaaaatagccactatacgtggaattgtcatgctcggatactgcggtatatgtaagaaagcaccaagacctgctatcacaccacatactaacgcaatatatagaaattgcttcaaatcattcactcctaaattgttattacactattacacatagctaatcatcaatgtgaaatcaccttcaaagacactatccaaatcttcagaagtcaaaataaagtttgtaccagtagtcagtttgaaaatttcaccatcgacaatcatttgcccttcaccttccaacactgtaactaaacagaactctctaggcttcatataatttaacgtgccagaaatttcccatttaaccaatgtaaagaaatcattcgatacaatgtgtgtacacttatggttctcaataatttcactttcaggcaaaatattaggtaatggtgcattgtactgaataacgtctaaagctttttcaatatttaacggtctaccattatattgattatcttgacgattgaaatcataaagtctatatgtaatgtctgacgattgcatcgtttcgtatgctagtattcctgaagaaatagtatgtactgttcctgctggaataaaatagaattctccaggttttactttaatatatctaagtatcgactctatcgttccgtgttgaacatgattcgcaacttcttctctagactctgctaatgtccctataactatttctgcatcttcttcagcatctataatataccaacattcagatttgccatattgcccattttcatgttcaaaagcataagaattatcagggtgcacatgaatagaaagtgattctcttgcatccactattttagttagaagcggaaaatctttgcttgggaaatcaccaaacaattcacgatgttctgaccaaatacggtctaatgtttgaccttgatatggtccattaataatctcgctcgtaccatttggatgtgctgacacacaccaacattccccagttgtatcattgtctaattgatatccaaactcacttagacgttgaccgccccataattttgtttttaaaattggttgtaaaaataatggcattgttgcacctccattgtgattaagtaagcaatagaactctgatgttgttgttccattatattttgattttgttctcatttatatcgtattataaacttccacatttcaaattaactattagtgattgtaccatatttactaacattgcagtactgccaattaaagcgcttcacttaaatttacagtactttaacatttttaaaattttatagcatagagattatatctctcttacatttgtacatatttctctttaaatttactcgcccattataccaattaataaacaactttaatagttgtgccatacattgttcaaattcattgtaaaacacatagacaatacgtacttattcatacttataattcatcattatcaaaaaaataacgagttacgaaaaagtaacccgcttcaaatcatatttactatccttattaatccgtttcattttcaaattgagttaaagcatctttaatgtcctggtcaccactaataatttgaaactcttggtgattaaaatgattggatgtgacaatttcttttaatactgtcgcaacatcttctctaggaatttcacctttaccttcaaaatattgtgctgcttctatctttccagatcctgctgcatttgtaagtgcccctggatgtaaaattgtataattcaaacctgaacgtcttaaatagtcatcagcgtaatgtttagcaattgtatatggctttaaatcaccgctatcatcaaaagcctgacgtctcgaatcatatgttgaaaccatgacatagtgtttaatattagcctctttactcgcaatcattgatttaacagcaccatctaaatcgacaataattgttttatctgcacccgtattccctccagaacctactgaaaagataactttatcgaatggtttaaacgtctcagttaaagtctctattgaatcattttcaacatcaacaagaattgctttcataccttgtgattttaacgcattaagttgatcggattgcctaacacctgcagtaaatggtacattttcttttgctaattgttgcactagtaacgaacctacaccgccattagcacctataaccaaaatattcatttacaacactctcctatttattattccctatgccataccactttatgagatatgtaaaacttgttacaactataaaaatcaattgacatactactgggaacgtattaaattaatatatgaacaaatattcatatgaaaggattgtcatataatgtcagaacaatattcagaaataaatacagatacattagaacgcgtaactgaaatcttcaaggcattaggcgattacaatcgaatacgtatcatggaattgttatcagtcagtgaagcaagtgttggtcacatttcacatcaattgaatttatctcaatcaaatgtctcgcaccaattaaaattacttaaaagtgtgcatcttgtgaaagcaaaacgacaaggccaatcaatgatttattcattagatgacatccacgtagcaactatgttaaagcaagccatacatcacgcgaatcatcctaaagaaagtgggttataatatgtctcattcacatcatcatcatgaccatatgcatagtcatgtaactacaaataataagaaagtattgtttatatcgtttttaataatcggtctatatatgtttatcgaaatcatcggcggtctccttgctaacagcttggcattactatctgacggtatccatatgtttagcgacacattctcattaggtgttgctttaatcgcatttatatatgctgaaaagaatgccacaactacaaaaacatttggttataaacgtttcgaagtactcgcagcgttatttaacggtgtaacgctttttgtaataagtattttaattgtttttgaagcgattaaacgtttctttgttccttctgaagtccaatctaaagaaatgttaatcattagtattattggtttaattgtcaatatcgttgttgcattctttatgtttaaaggcggcgacacttcacacaatttaaatatgcgtggtgcttttctacatgttatcggagacttattaggttcagttggcgccattactgcagctattttaatttgggcatttggatggacaatcgccgatcctatcgcaagtattttagtttccgttattattttaaaaagcgcttggggtatcacaaaatcttcaattaacattttaatggaaggcacaccaagtgatgttgatatagatgaagttatagctactattaaaaaggattcacgaatacaaagtgtgcatgattgccatgtttggacaatttcaaatgatatgaatgcattaagttgtcatgttgttgtagaccatacattgacaatgaaagaatgtgaattattattagaaaacattgagcatgatttattacatttaaatattcaccatatgactattcaattagaaacgcctaatcacaaacatgatgaatcgattatatgttcaggaacacatagtcattcacatagccaccatgctcatcatcacgcgcatgtacattaataattttaacctactgccattgcatcgattaaacttttcaatggcagtaggttttttatgtctttatggcgacttatttggtctttgatgatgcaatgtttattaacaaattttcaactattatttcttacattagtcatatttttgacaatttactattataattctctaactttagtcactttaattaatttttattagatattaatatgaaaataacgtgttttttgttattgtatttatatgaagaaaaggaggcaccactttgtttacttactttaaatcagcatttaaaaatgctaaaccacaattattaataacattgatatatgcacttatagcatttgctgtaattgcagttgtatatttacttgctaatttccagcttgctaagtatgtacaaactattgcaatttattcacaatttgggcaaaaaccaccagtagatgcatatttaaaagttatcgctgtattacttatagcagctgtagtttcactgtttgttttagttcaaatttttatcggaattacaaatgttatgaaacgagcaatgagtcatgaaaaagtaaaatttaccgatttatttattgcatttaaaaaaggtaattatttaaagagcgttctgatcggccttgtatctatagcaatgattatcgttctttcacttctgacatcattactatacaaattattttctccagtatcagaaatgattatgaattcagtacaatcatcatatgcagatagtacacacctggttggtattgctattacaactcaaagcatcataatcattgttgttttattgattaaagcaattattacttggttattgttaatacctattttcaactttatgactagtttcgttgaatcaactaacgataaagtaaaaacacacttagctaatggatttaaagcaatgaaaaatggtcaaaaaacatttttcaaatttttcattggaatactattattaaacttagttattattttatttaaaacacctgtgggttacttgatttcatttaatacgcaatcactctctcaaagtgttgcagaaaatatcataagagtttatacagtaataacaatcattttattcgttgttattcatgcagtcattttaatgggtatcgttcaatattacttaaaacgtggtcaaaaaattactaaagataaagtaaaaacagctgacaagaataaaaaagttgtcactgaaccaaaaaatacaaaagtagaaaatgataaagtgacaacatctgttgaaacgaaaacagaaaaagcacaagattcattaaatgataatactacaaaaacaatgacttcagataaaccagaagacaaccaaccaaaataaattttagagcccctaacaactttagttgttaggggctcttatgcagttgatgcgcagcatccaactgtgttcctctatttttcaactttagttgttaggggcttctttctaaaataactaagtgaattatctatatatgaagaggtctccaatactttttatataattcgtgattacattctatacttttaattgtattttctgctgtatggaaagttggttttattaattctgattatgttcagaactacaattcataagaaaaatgtgttaaaatatatttgtagtaagtagaagcaaaagatgaaaatctttaactcttgaaacacaaaaagggcaacactcggaaacatgttaccctaatgagcccgttaaaaagacggtgaccttatattttatttaaaaatagccttcaaaatgccggtcaaagcgaatagaaggttattttttatggtcttgagtactaatcaatactaaaccaatgattgttaatacaatcatcagcatttcaaaatcagacatgctagtcctttctaggagtaacaactataaccataggcatcacccctttattaagagattagccaccatctatccaacttgctcaataaatattataacatgcacacttttaaacagtaattcatagtataagttttttcatttcttaatcaactcgataaacagttgagtgacatacccttgtctaactagctatttcttcccctgttatcgtttgttcatcatataaaaatttaatttctcattttttattctctgataaagaagagcaccaaccttttcggctgatatgctcccttcaaaatagacattgaaaaatgaaaactttgaaagagaaatcgtcagtctattattgataagtattatcctatcctcgaaaaattactttcagacacaagtgaacaaaaattttactataagcgtatactttggcaatattcgaaggaaaaacatggattaacctatgcatattatacatttagagcttatatacttaaacatgatgaatttactccttatattatgaaatgttatcaatagatgtcgcctaaagatacaacaagattcgagacaaaacctgatcatcaagcacagtttgactggaaagaaagcattaactttaaaacgaaagataatcaaaggattccactatatataggtgtgctactactttattattctcgttttataatcatgtatgacaatgagtaaatcaagtgatgccttatttaattcattaacacaatcgtttgagctaatagaaggtgtatataatgaacttgtaacggataacttgaaaatagtcatgtataagccaagaaaagaaagtacaagtggtcgaataaatcgtagatttaaataattcgctgatggttttaaatttcaagtaaaaccttgtatttccggcctccctagaaaaagataaagttgaatcaataacaaaaatattagatgaaattaatgcttaccaagacgaattgcatttggaagagattcctaagtttttttaatcttaatgaacgatttaactactaagttcatactagtacaggtaaattgcctattactgcctaagagaaagaaaaaattttcttacaaccactacagaatgtgaatgtaaaaaactcatataaagtgaaacatatcttacttatggaatgaaatgtttgattatcccaaaatcacaaatgcgattttggagttgttaggggctctaacgcaaatacactcctacttaaaataacggtagttgttatagtatacttaaatgcataaaccatataaaaggtgatgctaatatgacatacggttcaattgtagctatactctgtgccctatttgtgattttcttcattccatatatggagaagaaagacaaaaagaagaaataacactagtatctggattactagcatacaaaggagcagtaagacattttctaatagaaaataactttactgctcctttgtaaattactcttcaactattgtaaattaaataataaataactgccgatgttattaatcagctaaaaaatgctttgctaaatattttgctgcgccatcctcttcattcgtataagccgttacatctgaagttaatgcttggatttcaggacgtgcatttttcatagcgactgtgtaatggccaaattcaaacattgctctatcattgtcgctatctccaataactaacgtttctttttgattgatgccaaaatgttcaatcatttctttaatgcctgtacctttatcagtttgataagccattgtttccgcattaaatcttgatgaatttgaaacactaatctgtagttgcacatgattttgctttaattcatctctaaatgctgttattttttctaaattagaactgaacagataaatttttgaatattcaccttcaggaaacttagttacccaatctatcttaccagcaagcgcatcttgtcttgaagaccattcactatgacttacgccattaataggatcttgactacgaatcatatctcgcatccatgtttcatcttcttttaaagaaactctattaccttcaaaaggaaatacctcataataaatttgttggcgcttagctaaattaataatttgttgcacttgagccaatgataaaccatgtttgaagataatttctccatctacttctccaatggttccatttgaactaatgatgccatttaccgcaaaatcttcaggtacaagttgatgtatttcagaatgcgaacgtccagtcgctaaaaatactttatatcctttctctctcaatcgattaatgacatctttcgtatacgttgatgcttgattattttcatgtaaaattgtaccatccatgtccaaaaatattgcttttacgttatccatattgccctccactgtcaattttagcttaattaaattttgtcattattagttagtatttgcaaaatatttactctaacatcgccatagaaaatcgattattccatctttgaactgctacatttttctggaaaaatcgtgacatgttttcagatgtcaaaatatcatctattaacccttgttgtacactttccccatcttttaatagcaaaattttagtaaagttaccagtaatttcttcaataaagtgcgtcacataaatcatcgcaagcgttggatatgaatctgacaatgagtcaagtatacttaacaacgattctcgtgcaataaagtctaaaccagctgctggctcatctaaaattaaaacctggggttgccccattaaagctcgcgcaatcatcactcgttgtttttcaccggtagataaataaccaatatattgttgtgctttagcagacattccaactaatttaagtaattgatgtgcttcattacgtacctcatcatcaatatcttgataaacaccaattgatttaaaagcaccgcttatcactacatcgattactctttcaccctcttgaaacttttccagtaaactatgagatacaaaacctatatgttgtcgtacagtttctgtagaataccctaccttgccgggcattttaccaaatagattaacatagccagttgtcgcaggctcatacgcatttaaaatatttagaagtgttgtcttgccagcaccatttaaaccatatagaatccatttatcaccttcattaatttgccaagaaatattttttaaaattgtttttccttgcttcattcgcccaacttgatctaattgaattaacatgcgatgtcacccctttattgctactccatacttctcataaaatcatattaacatatcactcttaattgtcagactatttaaacaaataaactacttcatttttacgcatttctgccgaattaagatgaagtaaacgctaagtcgacctaaaaaagcacccttttagtcgattaatctaaaagggtgccatatactttaattttaatacatgattgattctaaaaaagtgaattattccacagtaactgatttagcaaggttacgtggtttatcaacatctaaatctctgtgtaatgctgcatagtatgaaattaattgtaatgtaacaactgatactaatggcgttaataattcatgtacatgaggaatgacataagtgtcgccttctttttcaaggccctccatagaaataatacatgggtgtgctccacgtgctactacctctttaacattaccacgaattgataaattaactttctcttgtgttgctaaacctacaactggtgtaccttcttcgattaaggcaattgtaccgtgtttaagttctccacctgcaaaaccttcagcttgaatgtaagagatttctttaagttttaacgcaccttctaaacttacgttatagtcaatagtacgtccgataaagaatgcattgcgtgttgtttctaagaaatctgtagcaatttgttccatgattggtgcatcgtcaacaatcgcttcaattgctgttgttacttttgctaattctctcaataaatcaatatctgcttcacgaccgtgctcttttgcaacgatttgagacaagattgataatactgcaatttgtgcagtatatgcttttgtagatgcaactgcgatttcaggacccgcgtgtaataacaatgtgtggtctgcttcacgtgataaagttgaacctgcaacattagtgattgttaatgatttatgacctaatttattagtttcaactaatacggcgcggctatctgcagtttcacctgattgagaaatataaacgaacaaaggtttttcagataataatggcatgttgtagacaaactcagatgcaacgtgtacttcagttggtacgccagcccatttttctaaaaattctttacctactaaacctgcatggtagcttgtacctgctgcaataacgtaaatgcggtctgcttctttaacatcattaatgatgtcttgatcaattttcaagttaccttctgcatcttgatattcttgaataatacgacgcattactgctggttgttcatgaatttcttttaacatgtagtgtgcataaacacctttttcagcatctgatgcatcaatttcagcaatatatgaatcacgttctacaacgtttccatctgcatctttaataataacttcatcttttttaacaataacgatttcatggtcatggatttctttatattcgcttgtcacttgtaacattgcaagtgcgtctgatgcgataacattgaaaccttcaccaacacctaataataatggtgatttatttttagcaacatagattgtgtctttgtcttcagcatctaataaacctaatgcatatgaaccatgtaataatgacacaacttttgtaaatgcttcctcagttgaaagtccttgatttgaaaagtattcaactaattgaacgataacttctgtatctgtttctgaaatgaatgatacaccttgtaagtattcaccttttaactcttcatagttttcaataacaccgttatgaactagagtaaaacggccatttgatgattgatgtggatgagagttttcatgattcggtacaccgtgtgttgcccaacgtgtgtgaccgattccaacaggaccatcaaaatcgctactatcagcaactttacgtaattctgcaatacgacctttttctttgaatacagttgtattatcatcatttactactgcgatacctgcagagtcataacctctgtattctaatttttctaaaccttttaataataattctttggcattatcatagccaatataaccaacaattccacacataacgacattttcctccatattggaatagtacgcgtaaattatgatttattgccgataatttagattgacaatctgctttcataatataaataggaacatgctatcatcgcattcatccataacaaattaagcatagttatttttacaactatgcaaattgctcacactgtactttccatattaatattttttatattcaatttctggcgatcttattaactttgtccattaagtcaccctaatgttttacttaataagctaacgaatgagccacatccgggatagcatccgccgatctattcgatcactatcctcctcgtctacaaatacatattttgcactctataaaggccactcatatattaacctttaatcttcaaatacaaatatttatttgcacaggcgctttaactgtactgccgaactttccccctttccattaatcattattgtacaacggtgttgttttgttttgcaaatattttcacaataaaattttaaaaatcctaaaacaatttttttgttttactttttcaaaatatctacgcagtcacattgatgacactttatttaattttgtcacatttattttgacaaagttgatttttgtttatattgaggattgcgttatggctctttacactaaagatagtcacatacattaaaaaagaggtgtaaatatgtcgcaaactgaagagaaaaaaggaattggtcgtcgcgttcaagcattcggatcatttttgagtagtatgattatgccaaacattggtgcattcatcgcttggggtttcatcgcggccatttttatagataatggttggttcccgaataaagatttagctacgttggctggtccaatgattacttatttaatcccactattgattgcatttagtggcggtcgtttaatttatgatttacgtggtggtattatcgctgcaacggcaactatgggggtcatcgttgcattacctgatacaccaatgttacttggagctatgattatgggtcctttagttggttggttaatgaaaaagactgaccaattgatccaacctagaacaccacaaggttttgaaatgctatttaataatttttcagctggtattttaggatttatcatgacaattgcaggatttaaaattttagcaccacttatgaaatttatcatgcatattttatcagtggcagttgaagcattagtacatgcacacctacttccacttgtaagtattttagtagagcctgcaaaaattgtatttttaaacaatgcgattaaccatggtgtattcacaccgcttggtgcagatcaagctgcaaaagctggtcaatctattttatacacaattgaatctaaccctggaccaggtttaggaattttacttgcatatatgatttttgggaaaggtactgcaaaagcaacttcatatggtgctggaattatccacttcttcggtggtattcatgaaatttatttcccatatgtattaatgcgtcctttattattcatcgctgttattttaggcggaatgactggtgttgcaacttatcaagcaacaggatttggatttaaaagtcccgcgtcacctggttcatttatagtttactgtttaaatgcacctagaggtgaattcttgcacatgttactcggtgtcttccttgctacacttgtatcatttgtcgtagcagctttaattatgaagttcactaaagaacctaaacaagatttagaagctgcaactgctcaaatggaaactactaaaggtaaaaaatctagtgttgcatctaagttagtatcttctgataaaaatgttaatacagaagaaaatgctagtggtaatgttagtgaaacatcttcattagatgatgatcctgaagcgctattggataattacaacactgaagatgttgatgcacacaattacaataatataaatcatgttatttttgcctgcgatgcgggtatgggttctagtgcaatgggtgcaagcatgttacgtaataaatttaaaaaagcgggcattaatgatattacagttacaaatactgcaattaatcaattgccaaaagatgctcaattagttatcactcaaaaaaaactaactgatcgtgcaattaaacaaacaccaaatgccatccatatttcagtggataatttccttaattcaccaagatatgaagaacttttaaataatctaaaaaaagatgatcaagcataataattaaataaattaaaaaatggaggataccgccatgttattgagtacacgtgaaaaagaaatgatagccctattgattaagtaccacggtcaatatatcactatacacgacattgctcagcaacttgcggtgtcctctcgtactattcaccgtgaattaaaaggtgttgaagcatatttaacttcattttcattaactttagaacgcgcaaacaaaaaagggctacgcattactggcgcagattctgatttaaacgatttgaagcaatcgattgcacaacatcaaaccattgacttatctgttgaagagcagaaagtaattattatatacgctttgatacaagccaaggagccagttaaacaatatagtttagcgcaagaaattggcgtttctgtccagactttagcaaagatgttagatgatttagagctcgatttaaataagtaccaactatctttatctcgaaagcgtggcgaaggtatttacttggtaggtactgaatcaaagaaacgtgaatttttaagtcaattaatggtgaataacttaaatagtactagcgtttattcagtaattgaaaatcattttgtctttcattcattaaatcaaatccacaaagactttgttgacttagagcgtatttttaatgttgaaagactattaatggactacctaagtgccttaccctaccaacttaccgaatcaagttatttaactttaactgtccatatcgtgctatccatttcacgtataaaaaatggagagtatgtcgcattaaacgatgatatttatgattctgtacaaaacacatttgaacacaaagtagcaagcgaacttgctgataaacttggtcaaatatatgacgtcacgtttaatctggcagaaattgctttcattactatccatttacgtggtgctaaacgaaaaaatcttaatgatacatcattaaataatcgttgtgaagaaaacaaaattaaagcgtttgttaaaaaagtagaaatgatttcaggtatgacatttgcagatttggatactttagtagatggactgacgctacaccttaatcctgcaatcaatcgtttgcaagctaatatcgagacctataatccgttaacagacatgattaagttcaaatatccaagactgtttgaaaatgtaagattagctttaaatgattgttggcctgatttgatttttccagagagtgaaattgcttttatagttttacactttggtggctcgattaaaaaccaaggtaatcgatttttaaacatattagtcgtttgcagcagtggtatgggaactagccgtctattatcaactcgtctagaacaagtttttagtgagattgagcgtattacacaagcatcagtcagcgatttgaagtcactagatttaagtcaatatgatggcattatttctactgtgaatttagacatagactccccctatttaacggtaaacccattattaccagatagtgatatcagttatgtcgcacagtttttaaatacaaagtctacgttccaagagacgcgcgataaatcatcaaacatgattgataaggatgatgttcatattgaaacgaaagatattgatggcaacacatcttttgaaaatgaacaaacttcatacttaacttcagttttcgaaaaacatttaagtgacgaaaaatcagaacaattaatgcatcatatgcgttcgggtttaactttgcttgattcagtgaaaatagttagtaccgaagttaaacagtggcaaacatatatcgcagattatctatatcaatgcgatgtaataaacgatccaacgtcattcgctgaactactagagcaacgattgattgacaatccaggatggatattaagtccatatcctgttgcaataccacacctaagagacaatatgattaaacaccctatgattctaatcacagttttagaagaaccgttaacattgcctagtattcaaaatgacaatcaaacaattaaatatatgatttccatgtttattcctgacaatgattttatggcatcactgataagtgacttgtccgaatttttaagtttgaaattagaatctattgatacttttatggaaaatccacaggaacttgaaacattattaagaaacaaatttttagaacgaattaaaaaacaatttatttaggagtgtacaaaatgagcgaattatttagtaatgacaatatctttttaaatgtaaatgttaacagccaaaatgaagcaattgaaaaagcaggtaaagccttagttgatagtggtgctgtaacagatgcttatattcaagcaatgaaagatcgtgagcaagtcgtatcaacatttatgggaaatggcttagcaattcctcatggcacagatgaagctaaaacaaatgtgattcactcaggtttaacattattacaaatccctgaaggcgttgactgggatggcgaagtagttaaagttgtcgtgggaatcgctggtaaagatggcgaacatttagacttgttatctaaaattgcaattacatttagcgaagaaggaaatgtagaccgtatcgttcaagcaaaatctgcagaagaaattaaacaagttttcgaggaggcagatgcataatgaaagcagttcattttggtgctggtaatataggtcgtggatttattggatatattctagcagataacaatgtaaaagtaacatttgcagatgtaaatgaagaaatcattaatgcattagctactggacatcaatatgatgttattttagctgatgagtctaaaacaacaacacgtgtaaataatgttgcagcgattaactcaatgcaaccttctgaagaattgaaacaagcaattttagaagcagatattattacaacagctgttggtgttaatatactacctattattgctaaatcttttgcgcctttcttaaaagaaaaaacaaaccatgttaatattgttgcttgtgagaatgctattatggcaactgatacattgaaaaaagcggtacttgatattactggacctcttggtaacaatattcattttgctaactcagcagttgatagaattgtaccattacaaaagaatgaaaatatattagacgttatggttgagccattttatgaatgggttgttgaaaaagatgcatggtatggtccagaactaaaccatattaaatatgttgatgatttaacaccatatattgagcgtaaattattaactgtgaatacaggacatgcatatttagcgtatgctggaaaatttgctggtaaagctacagttttagacgctgtaaaagatagttcaattgaagctggcttacgccgtgttttagctgaaacaagtcaatatattactaatgaatttgattttactgaagcggaacaagctggttatgttgaaaaaataatagaccgtttcaacaattcttatttatctgatgaagtaacacgtgtcggacgaggtacgttacgtaaaattggccctaaagatagaattataaaaccattagcatatctttataataaagatttagaacgcactggtttattaaatacagctgcattgttattgaagtatgatgatacagcagaccaagaaactgttgagaaaaataattacattaaagaacacggtttaaaagcgttcttaagcgaatatgctaaagttgacgatggcttagccgatgaaataattgaagcttacaattcactttcataatttattgagctttgtttgaaactataattttccaacgttattcgttaacaatcagtaataatgtagtagttccgttgaattaacaatattacatttctgaacataaaaaatactcccttcaacatagacacttaacttgtgttatgtatgaaaggagtatttttgcgttaataatttgttttattttcgagccacagccacctattcaatggctattggtcattactaaaacaaattcatattaactgttagacttggttacttagtaaggaatatttccctatgaaataactagatgttcacattcttaaataaattttattcttcagtttgttggtctttcttagtgaatcttctaattaagaatgccatacctgcacctagagctaattcaacatatggtaaatcgtcattatgtgacataccagtatctggtaaagttttagcttgttgttttgctttattttctttaccttgttgcgctgatgttgccttagcttggtgtttgtcagtgttagttactttaagcatatcttgattagcactattgcttccatttgaaactgtagctggagatgcattggcaccgtcgttttgcgtagctttattgtttacatctgcagttgcaccaattgctgcttgattatcttttttatctgatgttgccatgtcagccttttgactatcctcagtcgaagtcgctttatcttttgcttctgacggtttagatgttgatggtttattcgatacatcagtatcaacgttgccttcagatttatctgcttcgttagatgcaacgttagtttcagacttaagttgtccagcatctgtttgatttgtcgtactttcttttttatctttctctgtattagaaggtacttttggttctgtaatgtctgctgaaggcaatgtttcagttgttgattcaaccatactttgatttgttgaatctctaccatctttttcatccttagctttattttcagattttggttgtgcaaccttgccattagttgattgagattcagcactattatttacttcagcattttgttttgaatcatttacagatgcattatctttgctatcagcagatgatgctgcacctgtgctcgcatttgttgttggaaccgttgctgttgatcctgttggtgcgttctcgtttgttgcagttgtactattgttatttcttgcgctttctgctggcgttgcattatctgtttctgttgcagatttatcagttgtgccgttattagttgattctacttctgatttatcacttgtaccattacccgttgccgaattgtctgttgatgttgctgttgttccaccagttgccgcatcattatgattatttgtcgttgttgaagacgtatctgcattggcattatctgttgactcagttacattaggttgtccagtattttctggtgttgcattagcatttgaatttgctgttgcatcattattatctgaaccactattagtatcattagcatttggatccttctgaggtacaatcgcttcaattgcaggtatcgttacattttgtaattcatcaacttctgtatttgtttgcgttttatctaatttatcagcaaatctgtcaaaatatctacctaaatctgtacgtgcaatttctttcgccgatgcatctgcatctgcattttcaattatttctatttgcttgttaaccacttctctaattgcttccaaagcatttttcttaactactggattaatacgttgtgctttaagttgttcaagcgcactatttttgacagtagcgatttctgcatttgtagtttgatcagaaatatcttcagttgcttttgataaaatgtcttctaatgcattcgtaaacgcttctttttcttcagttgtagcatcagcgtcgacatttactcctgcttcaatctggtctagtgcagtttctaattcttcgatagctttttgtttttctgttgagtcaatttgaatgttatcaaacgcctcaagtccttgagctttcgctttttcaacttcagcagttgttgttgcatcagtaataccttgtttagcttgatctgtaatttgtttaatcgttgctaatgcagccgttttttcttcagcagttaactggtcactttggtctatagactctttcgtttcctgtgctttagcatcaatcgcttggtttgctttaggtttaacagtagcatctacttgaactgcatcaattgtcgctttaccttgtgttaatgcatcatcaacatcactattatccacaccattattaatgctttctaatgcagtttgaacattttggtcaacttgcttaattgcttgttgtttttcatcttgtgttgcattagtgtcagctaaaatattatttttcttctgatctgcataggcatataaatctgttgtagccgattcttttttaccggttggaattgtgtaatcgttaatattatctaagtcattatgaatttgaacttcaatgtcatctttagaagtagcttgattaacattttgatccgctgtttgttttaattcagcaagtttttgtttcgcttcagcaatttcacttgaagtcgatgcgttagagttatccgcttcgttcactttagcgttatatgcatctgcaattttagctaaagcatcttttttgtactcactaaatgttttaactgcattaattttagctttcccttctttaaccgcattatcaacatattcatttgttgatgattgatcaatatttgttttcgcttgatttaacgctgcatcaacttcttgttttgcatcattaatttcttgttgtgacgcatttggtgtttgttcaatttgtgttttcttatcagctgcagcttgatctaattctgttttacctgctggtttcttaacaggatttgcatgaagttgttgaactttttgtactgctgtatctttagcagtagttacatcacctgtagtagttgctgcattaatattatttaaaccttcttcatatgctgctctaactggttctatatcttttcctttttcttcatttgtagtcgtattatcattaaggatttcagttattttattttgcatttcatttagcaattccgctcttgcattcgttttaacatctgttgatgcttgaattgggtcaattgcttgaattgcattatcttttgcagtgtttacatcatcgattgactttgcattttcaatattttgattaccttgcgttaattgtgcatctacttgttgatttgcttgttctttttcttcagtagtcgcatctgcagtttgtgcaataagtgctttttgttcctttgcttttgttgctaattcatctttagctacatctttaattgtcgtatcagcagtaataccttgaatgtcagcaactgcttgatctttaatttgtgtaacatcgttagtcgtttgcgcatttaaaatatcttgatatgctttttctttagctttagaaactaaatcttttgctgcatttttctcttcagtcgttgcacctgtagtattatcaattgcttgattttgagttgtcacagcttgatctacttcatttttcgcattcgatttaactgctgttgctggttgtgtactttgaatcgaatttttacctgcatctttagcagtgtctacaccattattgtcagttgcagctgtaatgttatttttcgcgtctgtaactgctgttgctagttgttgaatcgccgcttctttttcttcatttgttgcgttttgatcgttattaataaccgctgtttgtgctgcttgtaattgatcgatctcatctttcgctgcttgtttcttcataacttttggtgttacagcgttaattgccgcttctgcattagtttttgcctcatctacttctgcatttgttgtagctgctgtgatggcttgatttgctttagcattttcagtattagcttcagtttctgctgcttgtttctcttcatctgttgcatctggcgtagcttgaattgcttgtaacttgttatttaatattgtagtgatttcattacgtgctgtagcttttttattaacagttggtgtcacttgatcaatactagcttcacctgttgtcttcgcttgatcaacttcattttgactattagcagtctcaatgtggttgtttgcttctgttactgcattatctacgttcgcattagccgctgcaatttcttctgctgtaatctcttgcgtttgagcaatggctgctttacgttcattcgctttcgtagcaatggcttgtttcgcatcatctttcgttgttgtcgctggttgaattgcttcaattttagcaatttctgcattcttagccgcttcaacttctgcatttgaatgtgcaccatctattgctgtatcagctgtcgttttttctgtttgaacttgttgtttcgctgctgttttctcttctgttgttgcaccgttattagcatcaattgctgtttcttgcgcttgtactttatctgcaattgcttgtttcgcttgaggtttaacatttgcatcaggtgtaatggctgcgattgtagcttcatttgtagtttttgcattatccacatcattgtttgctgcggcattatcaatatcagcgtttgcattaactactgcttgatccactttatctttcgctgcttgttgttcttcagtagtcgaatcattcattgcttcgattgcagttttacgttcacttgctttttgagcgatttctgctttagcatccgatttcttagtagtggcagcttgaacttgattaattgcagcaataccattgtctttagctgtcgttacagcactgtttgtatttgcagcatcaagattcgttcttgcctcttgtttttttgcatctaattgcgtatatgccgcttctttttcttctgttgttgaagtgttactattttggatttcttgtttacgtgtattatatgcgttgtctacttctctatccgctgcaggtttaactctagcttgtgtttgaatggcattgattttatctaatacttttgctttagtatcagccacttcctgttttgatttaacaacttggatgtcatgtaaaccttctgtttgagctgcatctactgctgcatcagcttctgctacttcttcatcagttgcatttgaaactgtagcattttgagcttttctagctgtagcagcttgtttaacttcattataggcatccatttttgtttgcgtagagtccgtaatattctcaattttgaatatttcttcgtttttaactctatctaaatcttgtgcagtcgttgtcgcttcaattgctttaacacctgaaactttagctgcattaatacgttcaatcgcttccgctacctcttcatttgttgtatcaggatttaaaggtgcttgatcaatttgtgcttgaacaacttcgtcaaattcttcaagagctgctgctttagctgttgtagcaggtgcagtttgattaatatcattgatcgcttttgttttaatggcttctacttgtgcatttgttgttgctgcatcaatatctttaattgcctttgtttcaattttaccaattttatcatttgctacatctttttcatcttgtaatgatgcatttgactttttaatttgttgtttacgagttgtaactgcttggataatatcttgtttcgcttgaggtttaactgttggtgtaatcacatcttgttccaacactgcgataccattatctttttcagttgtgacaccttgtgctgttgtttgtttattaatttctgcgattgcattatttttatcattgttaattttagtcacaagcgctgcaacttcatcttgcgtaacttttttactttgttgtgctgctgtaaccttttcttgagctttagcatctaattcagaaattgctgcttgattatcaattaatgcagcttgtaatttagttactaaaccatcaatatccgcttgagatgcacgatttgcagtttcaacatgattcgcatcttcatttaaaatagtgtctgcttgttgtttaagtttattgtattctgcaattgatgctgttgtgtaatgactatcatcaacttgtgagttaacttgttgttgcaacgcatctttgttcatttcaactgctactgaaaatggatctgcagttagtgtaacttctggttgcgcattattaattacaacatctgaagcagtacgatatgttaatttttcattaaaatcaatatttttaggtgtatcaatattcgcaacattaactttatatgataattttaaagatttatctgggaataacacttctttcgtatgtgtaccacgtgctgttgtcacaccttggcttgtaaatgtaactttatttgcattttgatcataattgacagtcatatttttcaatactgtactgtcttcattaccattagggaatgttgtagttaatgaatcattaacgtaagttacaccttgtggtaatgttacttcatatttaaattgatctgctttcaatgaagcaccaaaattaccattgttaccgatttcagtattaatagtatattctttattgttagttgctttcggtgctaaatctctatttttgacatataaatgtgatcctgagaatagacctacattatcaatgaatgaatagtatttataaccatctttatttgttgtaattcttgaagcatcagcaactgctgtattgtcaggaataaattctaaatctaaacgatcagcatctgttggtactttaaataagtgtgcagtaccagtcttagctacatttacagttgctaattcagtatttttcttagcatctttaataactaaatttgttgcaccttgcttactattcgtttgcatagtagtaaagttgataattaattctgaatctggttttacattaacagtttttgaaataccgttaaagttaccgtgatctgtagaatcatttgcattcacacgacctaatgcagctacattccctctagcttggtagttttgagggttattcttatcaaacatatcgcttcgtcttaattctgagttaacgaaaccaatcttaccgttgttaattaatgaataaccatttactttatctgtaacagttacagttggatcctgtctattctcatctgttgatatggcaggatcatcaaacgttaatgttgtattaatactgccttcaccagtattgctagcatttggatcttgagtttgtgcgtttgctgctacaggtgctgctggttgcgctgctgctggagcattcgctggctgtgtttgatttgccggtgttgtattattattaggtgttgcttggttatttccttgacctgcttggttggcaggtgctgcttgatttccaggttgtgcttgtgcagcgttattcggatcagcttgattaccttgtccagctggttgtgctgtacctgctgccggttgtgctgcgcctcctgctggattagcctgtccaccttggtttgctggttgtgctgctggttgtccttggttggcaggtgcagctggctgtgctgtaggattagcttgagcaccagcatttgcgttaggctgtgcattggcatcagctggttgtgctggttgattttgtgcaggctgattttactctgctgcagacgctgttgtcgggttaatagatataaatgtaacagtggcaattaaagctgaaaaaataccgacattaaattttctaatactaaatttttgttgtctgaacaaattcattaagtcatcctcctggttgattattctcgctgttaaatgatgtcacttaatcaacttttaagataaacagtttgcttccatcttataaaaggtagagcaactctatctaattaaaattaattttattatcattatatattgcttaccagtgaattttatattacatattgattactttgtttttatgtattctttattattttgactttacgaaatatttttcttgctttagtcaaattaaaaaaccgatgcataagcatcggtttgatttatatcttgaaattatttatctaatcccattttatcttgaaccacatcagctatttgttgtgcaaatctttcagcatcttcatcagttgctgcttcaaccatgacacgaactaatggttctgttccagaaggtcttactaaaattcgaccttctccattcatttctacttctactttagtcataacttctttaacgtcaacattttcttcaacacgatatttatctgttacgcgtacgttaattaatgattgtggatattttttcatttgtccagctaattcacttagtgatttaccagtcatttttattacagaagctaattgaataccagttaataaaccatcaccagttgtattgtaatccatcataacgatatgtccagattgttctccacccaagttataattaccgcgacgcatttcttctactacatatctgtcgccaactttagttttattagatttaattccttcttgttcaagcgctttgtaaaaacctaagttactcataacagtagaaacaatcatgtcattattcaattcttgatttttatgcatttcttgaccaataataaacataatttggtcaccgtcaacgatttgaccattctcatctactgctatgattctgtctccatcgccgtcaaatgctaacccaaaatcactttcagtttcaacaactttttctgctaatttttcaggatgtgtagagccacatttctcattgatattatatccatcaggactacatccaattgtttcagtatctgcctctaaatcaccaaataagaatggcgctagtgatgatgttgaaccatttgcaccatctaaaacaattttcaaaccttcaaagttaacatctactgttgattttaaataactcaaatatttttgtgccccttcaaagtaatctgaataatgtacaatatcattgccaactggtcttggtaattctgggttttcttgatccaataatgcttcaatttcattttcttgttcatctgatagtttaaaaccatctgatccaaagaatttaataccattatccgcaactggattatgagaggctgatatcattacacctaactctgcacccatatcgcgtgttaaatatgcaacacctggtgttgaaataatacctaatcgcatcacttctgcaccaattgaaatcaaaccagctattaatgctgattctaacatttcacctgaaactctagtatcgcgacctacaagtacacgtgggtgtttttcacctttattatgtgctagaacatagccaccatatcttcctaatttaaatgccaattcaggtgttagttcttggtttgcgacacctcttactccgtctgtaccaaaatattttcccattgtttactctcctttaatttagctatttattttacgtttatataagccttcgtttcacttggttctgctttagagacatgttctggtaaattgatttttacagtcttttcagttgattctgaaataccatctaaatctacttctgcatcaacttcgcttatattttgcaagtcatctcgactaccgaagatttcaatttctttatcttctaagtcaatcgaacttaattctttatcatctgctaaactacctttctgtttaacatttactttaacctttttgctaaaaggctctactttaacttgtaaattcacttcattaggttgaatcgatacatttaatttattcagttttttatcaaaagccgttacttccgcgatatcttttgtgtcaccattaatctttttattagttttaaaagtggcttttaaataagcgatatcattcaattgttcttctccacctgttattttaactgtttgtggtgaaacttcttgctttgtaattttataaagtggatcaatatcactttgactaacatcaggttgaactgtcatctttttagttactttgttttcaagcgtaatatttgccaatttaggttttacagaataatgaatgtcatcagctaaccctttaacttgatacttctcttgatactttccagctttagcatttgataaatcaatcactactcttaaatcttctggattttcaatttttattatctttgattgtggtcctgaaatagtcacattaactgtttcaggcgcttttgttaaatgcaaatctttagtgttataaagaatttcaacgggtacatcttgaatcgttttactagacttttgaccaagattaccagtgttaaagatatttccaaaaacattgttaacagataaaaagaaaaacaatgccaaaagaaaggcaataaatcttaagccccatttactttctagcatattatttcacacctttcttttgaaagcgtgtgccaaaccaatgttcagcaagcaactcttcaaaaatttcgtttgaaatgtctcggcgtaattttccatcaaatgttaccgaaatatcaccagtttcttcagatacaataacggtaaatgcatcagatacttctgaaataccaaccgctgctctatgtcttgtacccaaacttttagatatcttaggactatcagacaatggcaaataacttgctgctgctgcaatcttcgtgccttgaataatcattgcaccatcatgtaaaggtgtattaggtataaagacattaattaaaagttcttgtgaaatatttgaatccattgcaatacctgtttcaatataatcttgaagacctgtttctttttcaaagacaattaatgcacctatacgtcttttagccatatattgcaaagcctttgaaaccgattgaatcaatttctcttcatctttactatacgtattagaagtatagcgttttaaaaagctacctctaccaagttgttctaacgcacgtctaatttctggttggaatattactattaaagctaataccccccattgaataacgatatcgaataatttagatgttgcagtcaagttcaatatcatacttatctgctgaccaataacaattactaatatccctttaagtaattgtatcgctttagttcccttaaagaccgtgatgagaagataaagtacataccaaactatcagtaaatcaaggatactcgttacaatttttaacgtactgaggttttgaaaaaagttggaaaaatccataacatctcctccgggtaatatttttccataatacccattataccaatcatttacatcactgtcatacgaacatatatttaaatagaaaaaaatttattttaaagattataactactcttaatcattttagtgaattaaaaaaagtagtgcaaaaagcaaaatatactttatacactacaaatcatttatttataataaagtttcaccaaaaaatgttccaactaacgaaaccgattgttcagcagtatggttgttatgatcaataagtggattcacttcaactaagtccattgaagtaactgactgagactgatgtaataattccagcgcaaaatgactttctctatatgtaagtccgcctaagactctagtacctgtgcctggcgtttcaagtggatctaaggcatcaacatctaaagataaatgaacgccatcaacattgcgtgacttcaaatattctattgtattttcaattacttcctttatccccaatttatcaatatctgacatagtaaatgttttaatattatgatctttgataaattgtctttcacctttatctaaatctctcataccaattagtacgatgttttctggcttgattacattactatttaattctaaaagttctttaggaccttcacctgtcaaaatccttagaggcataccatgaatatttccacttggtgactcttcaggtatatttaaatcaccatgtgcatcataccaaataacacctaaattattataatgtttacttattgctgatactgaacctatcgcaatagaatgatctccaccaagaactagaggaaatctgttattttcaattgatgctgatacttctttatttaatttttgagtaacatctataatttcatcgtagtttcttaatccattttgttcactttgaaatttttcaatgtctacagctgataccttaatatcccctttgtcattaacatcaaggtctaattgctttagtcttggtattaaacctgcatatctaatcgcagttggtcctaaatcaacacctaattttctttgtccaaatgttgacggtacaccaataatatcaattccttttttctttgtcataagcgtccccctttgttatacataatttcagaataatgtatacgcttactataatcaagtaatagccataacataacgccttagcatcctaattctcaaaaaataaaaaaagcacttcccaagaatggaaagtgcaagtagtgagccatagaggattcgaacctctgaccctctgattaaaagtcagatgctctaccaactgagctaatggctctaatggctgggctagctggattcgaaccaacgagtgacggagtcaaagtccgttgccttaccgcttggctatagcccaatatatagatggtggaggggggcagattcgaactgccgaacccgaaggagcggatttacagtccgccgcgtttagccacttcgctacccctccagcttattcagttaattaataatcaaaatggtggagaatgacgggttcgaaccgccgaccctctgcttgtaaggcagatgctctcccagctgagctaattctccaatataatgactcctacgggactcgaacccgtgttaccgccgtgaaagggcggtgtcttaaccgcttgaccaaggagccatggctccacaggtaggactcgaacctacgaccgatcggttaacagccgatagctctaccactgagctactgtggattaatattaatgcctggcaacgttctactctagcggaacgtaagttcgactaccatcgacgctaaggagcttaacttctgtgttcggcatgggaacaggtgtgacctccttgctatagtcaccagacatatgaatgtagattatacattcaaaactagatagtaagtaaaagtgattttgcttcgcaaaacatttaaatttgattaagtcttcgatcgattagtattcgtcagctccacatgtcaccatgcttccacctcgaacctattaacctcatcatctttgagggatcttataaccgaagttgggaaatctcatcttgaggggggcttcatgcttagatgctttcagcacttatcccgtccacacatagctacccagctatgccgttggcacgacaactggtacaccagaggtatgtccatcccggtcctctcgtactaaggacagctcctctcaaatttcctacgcccacgacggatagggaccgaactgtctcacgacgttctgaacccagctcgcgtaccgctttaatgggcgaacagcccaacccttgggaccgactacagccccaggatgcgatgagccgacatcgaggtgccaaacctccccgtcgatgtgaactcttgggggagataagcctgttatccccggggtagcttttatccgttgagcgatggcccttccatgcggaaccaccggatcactaagtccgtctttcgaccctgctcgacttgtaggtctcgcagtcaagctcccttatgcctttacactctatgaatgatttccaaccattctgagggaacctttgagcgcctccgttaccttttaggaggcgaccgccccagtcaaactgcccgcctgacactgtctcccaccacgataagtggtgcgggttagaaagccaacacagctagggtagtatcccaccagcgcctccacgtaagctagcgctcacgtttcaaaggctcctacctatcctgtacaagctgtgccgaatttcaatatcaggctacagtaaagctccacggggtctttccgtcctgtcgcgggtaacctgcatcttcacaggtactatgatttcaccgagtctctcgttgagacagtgcccaaatcgttacgcctttcgtgcgggtcggaacttacccgacaaggaatttcgctaccttaggaccgttatagttacggccgccgtttactggggcttcgattcgtagcttcgcagaagctaaccactcctcttaaccttccagcaccgggcaggcgtcagcccctatacatcaccttacggtttagcagagacctgtgtttttgataaacagtcgcttgggcctattcactgcggctcttctgggcgttaaccctaaagagcaccccttctcccgaagttacggggtcattttgccgagttccttaacgagagttcgctcgctcaccttagaattctcatcttgactacctgtgtcggtttgcggtacgggcacctattttctatctagaggcttttctcggcagtgtgaaatcaacgactcgaagacacaatgtcttctccccatcacagctcagccttaatgagtaccggatttgcctaatactcagccttactgcttagacgtgcaatccaatcgcacgcttcgcctatcctactgcgtccccccatcgattaaaacgattataggtggtacaggaatatcaacctgttatccatcgcctacgcctgtcggcctcagcttaggacccgactaacccagagcggacgagccttcctctggaaaccttagtcaatcggtggacgggattctcacccgtctttcgctactcacaccggcattctcacttctaagcgctccacatgtccttacgatcatgcttcaacgcccttagaacgctctcctaccattgtccaaaggacaatccacagcttcggtaatatgtttagccccggtacattttcggcgcagtgtcactcgactagtgagctattacgcactctttaaatgatggctgcttctaagccaacatcctagttgtctgggcaacgccacatccttttccacttaacatatattttgggaccttagctggtggtctgggctgtttccctttcgaacacggaccttatcacccatgttctgactcccaagttaaattaattggcattcggagtttgtctgaattcggtaacccgagaggggcccctcgtccaaacagtgctctacctccaataatcatcacttgaggctagccctaaagctatttcggagagaaccagctatctccaggttcgattggaatttctccgctaccctcagttcatccgctcacttttcaacgtaagtcggttcggtcctccattcagtgttacctgaacttcaacctgaccaagggtagatcacctggtttcgggtctacgaccaaatactaaacgccctattcagactcgctttcgctacggctccacatttactgcttaaccttgcatcaaatcgtaactcgccggttcattctacaaaaggcacgccatcacccattaacgggctctgactacttgtaagcacacggtttcaggttctatttcactccccttccggggtgcttttcacctttccctcacggtactggttcactatcggtcactagagagtatttagccttaggagatggtcctcccagattccgacggaatttcacgtgctccgtcgtactcaggatccactcaagagagacaacattttcgactacaggattattaccttctttgattcatctttccagatgattcgtctaatgtcgtcctttgtaactccgtatagagtgtcctacaaccccaacaagcaagcttgttggtttgggctcttcccgtttcgctcgccgctactaagggaatcgaattttctttctcttcctccgggtactaagatgtttcagttctccgggtgtgccttctgatatgctatgtattcacatatcgataacatgacataactcatgctgggtttccccattcggaaatctctggatcaaagcttacttacagctccccaaagcatatcgtcgttagtaacgtccttcatcggcttctagtgccaaggcatccaccgtgcgcccttaataacttaatctatgtttccatcctacaggaaacgcgttattaatcttgtgagtgttctttcgaacactagcgattatttcttatgaattcaagcttatttaaaactctttattcactcggttttgcttggtaaaatctatattttacttacttatctagttttcaatgtacaatttctttttagtcaagcgctcgcatactgctttgttttcaaaaaatcaaatgctcatttacaaaagtgaactccgctttaatttttcttaacgcattgtctgacaaccgctttctttaaaaagaatagattgtcaagcgctcgcatactgctttattatcacaagcaatatcgctttaaccaaaaaatatttgaatgttaaataaacattcaaaactgaatacaatatgtcacgttattccgcatcttctgaagaagatgttccgaatatatccttagaaaggaggtgatccagccgcaccttccgatacggctaccttgttacgacttcaccccaatcatttgtcccaccttcgacggctagctcctaaaaggttactccaccggcttcgggtgttacaaactctcgtggtgtgacgggcggtgtgtacaagacccgggaacgtattcaccgtagcatgctgatctacgattactagcgattccagcttcatgtagtcgagttgcagactacaatccgaactgagaacaactttatgggatttgcttgacctcgcggtttcgctgccctttgtattgtccattgtagcacgtgtgtagcccaaatcataaggggcatgatgatttgacgtcatccccaccttcctccggtttgtcaccggcagtcaacttagagtgcccaacttaatgatggcaactaagcttaagggttgcgctcgttgcgggacttaacccaacatctcacgacacgagctgacgacaaccatgcaccacctgtcactttgtcccccgaaggggaaggctctatctctagagttgtcaaaggatgtcaagatttggtaaggttcttcgcgttgcttcgaattaaaccacatgctccaccgcttgtgcgggtccccgtcaattcctttgagtttcaaccttgcggtcgtactccccaggcggagtgcttaatgcgttagctgcagcactaaggggcggaaaccccctaacacttagcactcatcgtttacggcgtggactaccagggtatctaatcctgtttgatccccacgctttcgcacatcagcgtcagttacagaccagaaagtcgccttcgccactggtgttcctccatatctctgcgcatttcaccgctacacatggaattccactttcctcttctgcactcaagttttccagtttccaatgaccctccacggttgagccgtgggctttcacatcagacttaaaaaaccgcctacgcgcgctttacgcccaataattccggataacgcttgccacctacgtattaccgcggctgctggcacgtagttagccgtggctttctgattaggtaccgtcaagatgtgcacagttacttacacatatgttcttccctaataacagagttttacgatccgaagaccttcatcactcacgcggcgttgctccgtcaggctttcgcccattgcggaagattccctactgctgcctcccgtaggagtctggaccgtgtctcagttccagtgtggccgatcaccctctcaggtcggctatgcatcgttgccttggtaagccgttaccttaccaactagctaatgcagcgcggatccatctataagtgacagcaagaccgtctttcacttttgaaccatgcggttcaaaatattatccggtattagctccggtttcccgaagttatcccagtcttataggtaggttatccacgtgttactcacccgtccgccgctaacatcagagaagcaagcttctcgtccgttcgctcgacttgcatgtattaggcacgccgccagcgttcatcctgagccaggatcaaactctccataaaaattatgatgtttgattagctcataaatactaaataatgtttgtaacttatagttacgttttttggaattaacgttgacatattgtcattcagttttcaatgttcattaatgttcaatctcttttattgtacttcatttaattattgaagtcaataacttttcgaacgattactttatttattttatattgtttttatagttatttcaatggtaagttttacacttttgaaattcttctttaaaaacatcatcgccgtttttgacgactttattatcttatcaactttataatttaaagtcaataacttttttgaaaacattcgtgtttgcaagtcgcttcttttttcaatgcgtttattgcttaacacaagaacttattttaccagcattccaaaacaaatcaatataaaaacgtacaaaataaaagtaattttgtacgtttagcatatattatacctatttatttgtggcagctataactttttgtgcaatcgagctataaattttacctagacgatcatctgattgatatattgacggtgcaaaatcttttggattccaagatggttgctctaaaggtaattccccaagtaattgagtattaagttcatcagctaacttagtaccgccacctttgccaaagacatattctttattccccgtctctttactttcaaaataactcatgttttcaattacgccaagaatagaatgatccgtatgttttgccatcgcacctgcgcgagctgcaacaaatgctgctgtaggatgaggtgtcgttacaataatttccttacttgaaggtaacatcgtatgaacatctaaagctacatctcctgttccaggtggaagatcgagtattaaatattcaatgtctccccatctaacttctgtaaagaaattcgtcaacattttacctaacattggtcctctccatataactggtgcattttcttccacaaaaaatgccattgatataactttaacgccatgacgttcaactggaattacttccttcccattaattccaggcttttcatcaatacccatcatatctggtacactaaatccatatatatcggcatctactaatccaacttttttaccttcacgggctaaggcaacggctaaatttactgcaacagtagatttaccgacgccacctttacctgaagcaatagcaataaattcaactggattattttgagataataagccttctatcgttttaggtttattttcttcttttggtttaaattgatttactttttcttctggtaacgtttcaaatcgtatacccacagtttttgcaccattttcttttaaaacattaacaactgccatctgtaaatctaattgcggtgcaccacctaattgtgccattgccactttaacacttacatgttctttttcttccttaatagaaacttctacaataccttctgtttcttttaaaggtacatctataataggatctttaatttctcctattagttctttaacttgatctaccgttaacaaagcaaatcccccttaatcaatttaaaatatctacatcatagcaaataacaatttttgcttagtctatcaataaaagtataaaacttttcattaaataaaaaaagaagttagcctattattttcaatagaccaactactataattattttaaaatttccttctattactttctatttctttaggttctcttataaaaagcgctatcacataagctgccataacaagcacagctacaaaagcaaatgagatatccacccctatagcaattgattgctgtttaatttcagttgcagttaaatgcgatggcgatgtagatgagaatatttttgcgccaaaactcatcaaagtaaccattaatgctgttcctaatgagccagccattacacgaccaaagttcataatagccgtgccatgtgagatttcttcatttttcaaagaattaattcctgtagtatttatcggcatcatgagtaaagaaactgaaaacattctaattgcatatacgactattaaatacgtataagatgtgtctgtatgcaagaaacacaacataatagtagtaattgttaaaatcgtaaaaccagtataaatcagtggtctaggaccatacttatcataaaatttacctgtaaaaaccgacataataccatttatgattgcacctggcatgataacaagtccagacaataatgcagatagagctaagctattttgaacatagagcggtattaataacgctggaccaaccattgacatcattataatcattgaactaatcgtacataatgcaaatgttctattcttaaaaacacttaaatttaaaagtgcattgcttatattgaattgtctacgaataaataagtagatgataatagaactaattatcattgcaccaatgactaccgggctagtaaatcctaggtcgcctgcactactgaatgcatataacattaatccaaatccaatcgttgaatacattacagagcgcttatctagcttagtatatttcacttcattatagcttgaaattgaaattaaaccgaagatgaatgcgactaaagcaattcctacaattataataaatggtactcgccaactcgcttgatcaatgattaatccagtaacagtaggcccgattgctggtgcaaattgaataactaaaccagctaatcccattgcaaatcctctatgttctttactgaataacgtaaacaatgtgaattgcattaaaggcatgagtacgcctgcccccatagcttggatgacacgtgctaacattaaaactccaaaattgggtgccatggctgcaacaattgatcctactaaaaatgtccccatcgctgctaagtataaaggtctagttttaatcctgtccattaagtatgctgttagaggtatcatgacgccattaacaagcataaacccagtaactagccattgcgatgtactttcattaatatttaattctctcattatactaggtaacgctgtatttaataatgtttgatttaaaatagctacaaacgcactaatcaacataacagcaactatgaagtttcgtctccgggttgttaattcaactttagccatcataattcctcctttgtaacaaatttacgtttattagcatatatacttaaaatatatttcagattaaagtaccaactatttatatcaatggttattattaaccgtgattaattgaagcaaaacaactcattttctactatatgaataaaaagaagttggaacacatcattgcccccaacttcaaaactctattttctattatttagatttttactttcagggtaaaactgcagcttacaaacatataaaaagcctataataaccatgatgacccaaaaatcaatgttgatatacacatagttcagatgaataataaaataaaataacgttgttgcaaccatataagagattaaatgaaaagttgcacctctaaaataagcattttcaggtaacatttttctaaaataatccatcaaatgttcaactgcaaatacgataaagtagccaaatataatataactaccataatatagcaaattgtcgtacatacttctgttatatgtgaagtcacctaacctaaaataaataagaattctacttaatccatatagtccgaaccctaaaaacgttaagaatatcgcaccagaaagcacaaagataaagagaacaataattgttgttaataaattataaaacttatgtttaagataattcataactattgtcctccttaccataaataatttatattgcttttaattttaagatagttgattacacttcaaacttagtaaaatgattatttgttactttatttacactacatcaattttaatcataattctattcttttgtttgtgacgccgcttctctataaaatatgagccatacaacgatgagccctacacttatcaaggatacaacgcctaaaatattatgcaagtttgcaccaaacaatcctgattttaacgcataaaggtatcccataatcgtcgaacctattgatgcgccaaggttttttgttaatccataaaacgacatcattttcttcatttgtattggacttgtttcctcttggacaattacactatcttttgtataaatatatccaaagcttagtccacttaaaattaagacacatgctataagaattggtaattttataccaaacgcaatgattatactacttaataataataatgtaaaagacgacaaatagataacttttcttgataacttcgcttcaatatggtgcaaattaaaattcaatgtaatccacgctacagaaagtggaaaaataactaatccactttgcaatggcgataaccccagttgttcttgaagatacacaggaatatataaattaaagcccattaaacaaacagctgtaagaagatctgtaataaagaccaaagtaatcattcgattaaattctgctactggtaagaatggggatgaaacttttttctcaacattaaataatcgaagtgcaactaatattgctaagacaaaacctatgatatttaaatataaatgttgttggtttaacaatgcaaacataattaaaccaatgaaaatataaaacagggtgatacctttagtatcgaattttgatttagccacagtttcttcttctggaaaatgaaatgtccagacaaccaatattattgcaataatcgcaatcggtatgtttatgtagaataaccaatgccatgttgcaaattctaatatgccaccacctagaagtggtccaatgatactcgaaatcccccaaacgctaccaacgatacccataattttatagcgtaatggaatttcaaatgctaatttgggcacaatttgtgacaaggacatcatgacaccagatccaaacccttgaattacacgtgatataaccaacatactaaaatgtgtgcttaaacctgacattaaactaccaaccgtgaatagtgtaagacctgcgatagcaatataaataattttaaaacgagttaataattcacctactataggattggcaattactaatgcgataaaatacgcggtaaaaattaatgaaattaaattccctgcatttaaatcttgcttaattgttggtaacgctaaagaaataattgatgattcgattgcagccataaacatgattaatattaaagctattacagttacaattgattttaaacgcatgctatacctccttctttatatatatttatacgattttatttacaaactattgatttgtatttgtataaacacttttgactttcaaatcttaacgataatagtcatacaaaacaatcctctattagaatgaattaagtaataaaaaaagcggagttccccccaccttctgataaactattacataaaatataaaatagcaattaaatgcaataatgatgctataacaataaaaatatgccatatcatatgaaaatatggtctgtttttttgtgcatagaaccatgcaccaatcgtatatgacacaccgcctaagaaaatgaataatatgaatatccatgatgtgcgaataaaaataattggtaacaagataatacctacccagcccatcactaaatagacaattaagcttaacttttggttaactttgacagctatggatttatataaaattccccaaagcgttgtgccccataataggataaacactgtccatccaatccaaccacctacaactgttaataaaataggcgtatatgtacctgaaattgctacataaatcatactatgatcaataattcttaaaatatatttatgaggcgtttcattttgcatagaatgataaatagtagatgaaataaacatcataaagatagaaataacataaatagacatactcacagacgcaagcgtaccatatgcaatataactgtgcacagctgcatagggtaacactaataatgttaacaaagctgcaacaccatgagatgctgcattaccaatttcttctccaaatgataaagggatgatatccttaaatgtttctacgattgtgtcattacttttttcactagatttggacacgtaagtcaccgcctaacattaaattaaacccattctacgtaaatcttcagtcgctgttgcaacactatctttaccttctttatttttaagaggtgagaactcttcttctctaggaacttgtaacgtgacaaaactagttccataagtaaatatgtcaaaatagaacaattcgaattttaaagttggttgttcaataacaccaaagttctcatctaattgcttcaaattcttaatagctaaatgataaggtaattcacgatttacagcatttaaaataaaaccaagtttaaatgcatgaataccgatattagcattgttaaattgatttgcaacttctggatctaattctgaatactccaatactgtatctttacaatcgacattaactaatcgcccaacactttctcctggttttggttgaatcgttttagaagtaatatcgtaatcatgttctaccgtaaatcctgcaaatagtggatccaacacttttactaaaacattatcgatattattcaagaaaatatacttaacgccattattagacatttcttctaagtatcctgccttgtctaaagatttaaacacgccaccattaccattcggcgtttccataatacgaccctgttgatttaaaattaattgtcctgcttcactaagcgccacaatattatcttgcttaaagaaatggattgattcttgatcataaccaaagtagttatgtgattcaaaataagctaaagtttcttcatgattgatatcacttgtcataatgtaccattgaattttatgaccagtttgtcgatgtagttcttttaattgttttgcctgaagttcaaataaacttacaccttcaatttcgaatgaacctttaggtcctttatatccaagtcttgttccttgtccacctgccatcaaaagtactgcaaattgtccttctttaatagcttgaagtccttgttcctctaaacgcttaatctcatcatcactcatttgtgatttaatatcatatttcacttcagaaactgcagatacatcatctatcgttttcttattgatgtataaatcgttatataatttggcaataaaatctaaatctaatgacgctaccttctcttcaagtgcttctttttcattgttactcattattttttcatattcacataaatgatcttgtttatatttagctaattgatttttatctagcattttatgcctcctgctgagtttgtaacctttaataatttattttctataaaaacttagtattccagttgcttattatatcattgatgaaaggctgaaataaaacataaactgttccgatcattaacgcagtagctaaagataagtctacaagtccacctgttttaaattgaatcggtgtcttcacattaaacggtaacggataaaataatttcacgccttttggtgttatcatatctagtataacatgtgacactaatccaattataattgctgccatataataattaggcgtctgaataatttgcaataaaaatgctatgattgcgataaataatattgaatgcgtaaaggttcgatgtccaaagatcaatctcacaaaaaaactaattaccttaaaccttctgccaatcttactttgagtgtgacatatatcgggtaataagctagctagagttgctagaatgataaccgtaaccgacgaaaaaatatccgtttgaaaatattgtgttgttagcgctccaacgagcatgccgcatgaagcatgtgttttacctgtcatatttgttctcctttaatactcatattttaccataaattcgccaaaaacacgaacatattttcgggttgaacttcattagtatgacacaatttaaaaaagtatcacataactcttgaaaacgattacaaaatcgtttatgatgtatttacaaaatatttaaaggatgtgtttgaataatggcaatgacagtaaaaaaggataataatgaagtgcgtattcaatggagagttgctgatatcaaaattcctacaagtgaaattaaaaatattacacaagaccaagatattcacgcagttcctaaattagacagcaaagatgtatctagaatcggctcaacatttggtaaaacgaatcgcgttattatcgatactgaagaccacgaatacattatttatactcaaaatgatcaaaaagtttacaatgaattaactaaataaattgtataaaaaaatcattcatggtgagggcttcatgaatgatttttttaattgattcaacacccagcataaacaaatacaaaaggacaactgttttcacaattttaacagttgtccttttctatatctaattacaataacaagtgtgccatcaaagaaataattggtagtgtaatgattgttctaatcaagaaaatcataaacaatttgccgatgcttacaggaatcttcgaaccaagtatgacgccacctacttcagacaagtatattaactgcgatatactaagtgccccaataacaaaacgagttatatcattttgtacaccttcaattaatatagaaggtaaaaacatatcggcaaaaccgataataatcgtttgagaagcctgtgccgcttcaggtatatgcattaactctaaaaatggaacaaaaggtttacccaaaataacgaacaatggcgtgtagttcgcaataatggtagcaatagtaccaatactcatcacaacaggtaaaataacaaaccacatatcaacaaccgttttcaatcctgacttaaagaagtcaacaatgcccggtgctttaatacctacttctgttgcagtatcaaagccatgtctcaatgccgtctttccttctggcaatgcctcagtacgcgcactttcaggtacctccttagcatactcatcaggaattttatttaaaggccaaattcttggcataatgactgctgcaacgaggcaggatactatcactgataaatagaaagcaaaaaattgattttgcatatgtactgtttcagcaactacaattgcaaaggtgatagaaactacactaaatgtcgttgaaataactgttgcctcacgacgagaataatatccttcaccatattgtctacttgtaattaagaccccaacagttccgtctccaataaatgatgctaaattatctaccgtcgaacgtcctggcaatgtaaataaaggtctcataaccggtctaaaaataggacccaacatctctaacaaaccgtattccattaatagtggcaaaaataatgccgcaaataagaatactgccactaaagttggcaataaactcgagaacaataatccacccgtttcatctgaatatattacttttgaaccaattcgtaaaaatgtcatccacgcaaagacaacggcaagtaatcgcaaaattaaccaacctattcttacattaaacgcattatgcaataatccatcaggtttcaatttatcttttaaaatagttgaacaaatcagtgttatgatacccgacaaagtaattatcgtcacaattaaaaatggcattacgccacctaatacatctttaagaacgcctgctaaaaatgccactggcaacgttgtttgcttctgtccatcttgttcgactggaattggtactagaaataataagataccaattaaagacatcgtaataaacttaagtctcccaatgactatctctttccttgaaaagctatccataaaatcaatccatttctctatgtattcgttttaagtatatacagaattctattcagttaacaaacatattccttatcattatatcttttaaaatgtttatgtatgcaaaataatgaataattacagttattaaatatacgctatttcttgtaatttttcaagatgaattcaaaaaaggttaagtacaattactgatttcgtacttaaccttttataaactctaatcatatgttagttatttcattcttcgtaataatattaagaagtatggtgcaccgataattgcaatgataacccctacaggaatatccagtggcggatgaatgccacgggctaaaccatcaccaaatgttaacaatatagcaccaattaaccccgacatgataataacgtgtaatgttttatttcctattaactgtctcgcaatatgaggtgcaattaatcctaaaaagctaataccaccgacaactgaaattgcggatcctgctaatattactgctaaaattagcaatagcattttaatagttttaacttttaaaccgagtgcggttgcaacagcatcacctagattcaatacatctaattgataactcaataaaatgatgattggtatcgttattaaaaaccaaggtaatatagtataaatattcgacatatcatgtccatatagactacccgtcaaccaaacaagcgctttgtttgcttccagtggatttctgattaataagaactgcacaatcgccgtacatattgcgcctattgctaaaccaattaaggcaagctttgaacctttaacatcatattttgaaattaaaaatgataaaaataaacttactgcaaaggcacctaagaatgaacctataggtaatacaaacaatggtgctgttggaaagatcataataataatcacagcagctaaactggcacctttagaaatacctataacatcaggtgaggctaacgggtttcttattacagcttgtataattgcacctgatatagccaagctactaccgataataataccaagtaacgttctaggtatacgatactcatttaaaataaaatcatcttgtgtaaagattcccttaatagcatcaatcgggtgaatcatgacagaccctacacataaacttatgaatatactcacaattaaaaggattgtgattaaactataacgacgtataattttcgttgtcatcatattcttttcacccctttaatcgttataaataagaagtaaagtgcacctacgaatgatgtaacaatccctactggtgattcataaggatatgtaattaaacgacttaatacatctgatagtagtaataaatctgcacctataataaatgttaatggaatcatgactaaataattcttactcacatagcgcttgacgatatgtggcacaattaaaccaacaaagccaattggtcctgctattgatacagacatacctgtaagaataataactaatagtccaatgatgattctaactttatttatattttgacccaatcccttagcaatatcatcgccaagttccattatcgttaactgacgaccaataaagactgttgcaattaatgcaccaataagccatggtagaatggttaaaatctcatcccacttcatactggataatgaaccaacaagccaaaacatcacttgttcattagaattttcatttaagattataatcccttcagtcatactactaaaaaataaatgaatggccataccagccaacgctaatttaataggcgtcataccttttgtagcaccagaaagtgtgtagacagttaatccaccaataaaggcgccaatgacacctaaataaagtgagtagtattctaatgatggaataataatcgttactaatacaatgacaaatgacgcgccagaactaacaccaaaaatctttggagatgccagtgggttacgagtcattgcttgcattaacaaaccagataccgctaacgcaccgccaataaataaccctgcaatcatccttggcatacgtacattatgtaataaaaacgttgcttttgtatccgtatgaccagtaacatagtgaacgatatcgctaaaattaatttttgaagaaccaattgccatatttaaatatacacaaataaaaagaaagcacacactcaccatatacgtgagtgttgtgcgtctttttcttttatgatctatggcagattggctacttaattcttttatagccatttacttccaccttacttttgttctttttttgataattcaacaagttctttagccatttcttcagaagaaattaagccacgagatcttgcccaaacatcacggtcaacaatatcaacacgattatttttaactgcattcaattttttccatgttgcatcttcttgtaacttcttgaattcagcagaatcttttttagcattatctgtcataataatcatgcgttcaggatttaagtcagctaaatgttcagtatctaattgtaagtaaggtcctttcaagtatttacttaaaccttttgttacatcatcacttaatgcatttttaaatccaagttcgtttaaaaattgtccaacatacgaatagtttggatgtgctaataaaccagctttcgcaacaactgctggaagcactttttgatttctatcaaatttaatttcatctttatacttattgattaatttatcatgttcagcaagacgtttttcgccttctttttctttatctaaagctttcgcaattgtcttgaaagcatcgatattttgcttgtagtcaccatcaaaactctttaatgataatgttggtgcaattttgtttaattctttattaatacctttatgtctactgctatcagcgataattaaatccggttttaatttactaatttcctctaagtttggctgtttacgtgtacctacagaagtataatcccgaattttttctctaactggtttaatgatacgttttttcttaccatcatcagcaataccaactggtttaacgtctaatgctgctaatgcatctgcaaatgagtactctaatacaacgatacgttttgcatctttaggtacttttactgtaccattttcatcttttaccgaaatagtatctttagttgatgattcttttttacttgaattatccgtattaccacaagctgcaactaaaaataaggcaactattaatcccaatatactaaaagtttttagacctctcatcgttccactccttaatatgtataacttcatttattattttattgataacaattatcattgtcaagtagcgttcaatctttttatattactaaaatgtatgactatatttatttcctctaataattatgactacaattagcacatttccttagacaaaatactgataatgtatcatggctatatcatctttgaattaatacaattgacaccatttagcatgaccgttatctctttaattcagctgatattacctattgcagttttatgtgacgaactgttgcacttaatttgataaatcattaaatacaaaaaatctaagttgaacaattatcatacaaccgtgcaaacgatatgtagtataacttgtcaacttagacttattgataaatatattaatattggttcaccatagcaggagatttcacatcaaaattttgaagtagcgtatcaatctttgaatcatcaatatataccttatgtaaatttttcatatacatcgaatgagaaagtgcttcataattaagtgaaaaactaatatgatctcctacttgatagtgtccttgaccatttaaatcaagcattaaatgatcactcgaagcgcctaaaatattgatatgctgatccataggtgaaatattatcgacttttgtatctaaatacccaatatctacaatagcttgtatgaatgattcatgcgtttgtgtattaactcgaggtttaatttctaaaatctcagcctccaatgtaatcgcatcttgatataacatagctatcgcttgatttgtagttgtatcaacacctctaaacaacgtttcacctattcgcaattcatttattttacccaaatcattatataaaagttgtggtaacatgctcgaattaccacctgaaataattttcaatcgatatcctatttctctttcaacagctgagacgaatcgattaatcataaagatatcatcatcacttggcgcatcagatttaaaacacataaaattgaatgctaaaccaacaaaatggatatttttcaagtgaataatctctttaatataatctaaaacatcataagtcagaacaccttcacggccatctttccaatctaccattaataaaatcttatgtttttttcctaaaacttctgctacttcatttatatgatgtatggtagataattctgtttggatactcatatcaactttttctatcatatctgaaatctcttttttggcaggcgtacgcaataacgtatatgttaaatcctgatctgccatactaattatgttatccaatctggattctgcaacatgattgatacctaacgcttttaagctttctacaattgtacggtcaccagctatgcacttaattactggtgtgaattgaatatttttactttgaaaaactgtttgaagtactttggcgttatatttaatcttcgatatatttatattaacgtgtgccatgtagtactacacctctttttttatcggattatctaactcaatatttaaatattgctttactttattttccattctcatatttaacaacgctttgacagtaattgtcggtccaaacaaaatatcttttaactcatttgcatgtggtagtgttgggttaatggcatgcgctactacttgctgtactatgttaaataattcggcttcttcaacacaatcatactgattaaaatgatggattaattctgccatttgattttgaataacagcatgttggaattttgcaatcactgcatctatagaatcagctattaaactatcatttgtaattttaatatctgatacacgatgttgtaatgtttctaaatcaattctagaaccacctaaatctctcactaaaaattgaatgtcaaaatgtggccccaagttcactactgtattttgcatgtgtgcttctaatgcaattccataattttgaataaaagcaattaaaggcgggattaatgcttgagagtatcgttcaataaatgtcgtaatactttctttagtaattccttgatttaaccactctaagtaactatccacgataactttttgatctattggatttttattaactagacttgcactaactactgttgcaccttttccatcaatttcaggcttttgtcttataatacaagcaagctgacgcgccctatctttatcaacatttgcatattcaccgaacggttccatagcaactttaaatcctggatattgattcaacatgttttgtaaagcataacttaactttggtccatctacagtagtcacagttgagactgttctaacggcacttgttgcttgtgcatcgacgggcaacttaacatgatatggtttatcaattaaagacatcgtcctgaatgataaagttgcttttgaaagtattgtaaacggcgttggaattaatatttttttagcaatccatgcttcaaaatatttccctatcgtatgatcatattgccaaggatgtactaaaatcgctctatagtcttcacttttcaaacctaaactcttcaaaaacacacgaatctgattgtagtattcgggaattatttcatcaataataaattgatcattaccatctatagctgtgcacacaacatggtctttttcaatcatcataatttgcaaagggatttctttttcaaactcaggtgcatatgctcgtacttcttccatagttaagggcaatttcgttttggttaaagggtgtgttggatgcccctctggtaccaaactctcagaataagttaaatcatctgtcttatcactatcttttacatgttgtaaccatgaaaaaaagttaatatcttgtggtaatcttgaaaatttaaaactttgacttattaatgtttgtctgtgagacatttgcttatatgtttcaactaaactatctcgactgtgtattaactcttcgcgtagtcgctctgaaatagggatatcaaagtcatgattcaacacatctagtagcccttctaacgtcatgattagcgacgtttcacctttatttaaataagtaatatcacctgtaaactcatagcgttctaatgcactttttctaacaacttcaatagtcaacacatgcatatgatactgaatttcaattaaagattctttttgtgaaataaatgtttgctcggggtaaatacgttctttaataatggcgttaattacacgatattgaatatttctatctgcctttgcccattcaagatataccatgattactttcctccaactttaacttcaactttctatttataaaatagaataccattgtaatgcatatagtacttattcccattattgaaaaagttctaacaatgccaaacacatctgcacatatactcatcaacagacttcccaatggaatcatacctctatccatcataataatactcagtactttaccacgttcataatctttaacattattttgaaaataaacgcgatttgtcgtacgtgcccattgactaaataacccaatcaatgtaatacaaatgaacatgatgacaatattgtgaaataccacacctaacaaagcaataccaaataaaaatgaacttaaataatacatatttaccataccaatatatttaagtactctaggtaaaactagcgttgcaataataccaccaatggcacacatcgtcatagcgataccaaatatttcagatttccccggaaatactttgtttgttaaaactggtaaaagtgtcgtatatgaaaaacctgtcgccataatcaataatgatgttataaatatttgtcgaccttccatatgtaatttgaagtaatctataatgacttttaacggcatgtaccttgttgcatcttcaggtattttagttactttaaaatgtaatggtaagcataataaaactgcgataaaataacaaattgactgtgcaagaaatgttgttggcgcatgatagactgctaatatgacaccagcaatggcaggccctattgaacgacaaatattaatgatgaatgaatgaaatgatacagcttgtgtagtagatattttatctgataaatctggtaagattgcttgtcttaaaggtgtttcaactgcacttaaaatccctcttaatgtcgcatatataataatgacgctaattggaattgcagtgaaactatacgtaagcacacataaaattgcagttactaaaaatgatgatgaaattgtaattctcagcaatcgccctttatcatatttatcggcaattgcccctgcccacacacttagtaataatattggtacaagtctgcaaaaattgacaatccccagataaactgcgttatgataagtggtaagtacaaaccaatttagccctatttgtccaatccaattacctagaaatagtagaaaagaactgctaaaaaaatattttgtcataaaacttacacccgcattctgttgataataagaatcattatcattaatatggattatacaaatctatcttgcttttgtaaaatatttcatagaggtgaattatgaacttgaacttaatttttaaagaacagacattaaaatttaacaaagaagaacaagaaacatatttatttttacaacaacataatagcgattgggctaatatttttaaagagatgattttacaaggaagagataaagtcactcagagattagtcacatcaatgcatcgcgaaaacttagttaaagcgcgcactcaaagtaagaaaatattgagtcgtgatttgattatgttagatatctcaacgactcatatactagaaatccagttcccacaagctaagcaaacattatatgctcctatcactggagaacacgcctttgatcgaattgatgttgaaggccctttctacattaaagataacattacaaatatgattacacgagtacaccatccaaatgaaattcttgagtgtattttaattgaagcaccagatttaaaaaatgctgctagtgatcaatttcagcaagatttaataaacagtgcaactaatatgacatttgcgatgagctatcaagcactgtcaatgcaacatgattctacacctttatttaatattatcgaaaatagcgaagatagttacttgcgttcagagcaagccgttattgaaggtcatccgctacatcccggggctaaattacgtaaaggtttaaatgcattacaaacattcttatattcttcagaattcaatcagcctattaagttgaaaatagtactgattcacagtaaattaagccgtactatgtcactgtctaaagattatgatacaactgttcatcaactatttccggacttaattaaacaattggaaaatgaatttacaccaaactttaactttaatgattatcacattatgattgtacatccatggcaattagatgacgtattacattctgattatcaagcagaagtagataaagaattaatcattgaagcaaaacatacgttggattattatgccggtttatctttcagaacattagttcctaaatacccagctatgtcgccacacatcaaattgtcgacaaacgttcatattacaggtgaaattcgtacattatcagaacaaacgacgcacaatggtccactaatgacacgtattttaaatgatattttggagaaagatgtcatatttaagtcctatgcatcaacaattattgatgaagttgctggtattcatttttataatgagcaagacgaagcagactatcaaactgaacgaagtgaacaattaggtacattatttagaaaaaacatataccaaatgattccacaagaagtcacaccaatgattccttcaagcttagttgcaacctacccatttaacaatgaatcacctatcgtgacattgattaaacgttatcaatcagctgcatcattgtctgattttgaatcatcggcgaaatcgtggattgaaacttacagtaaagcattgcttggtctcgtaatcccactagttactaaatatggcattgcattagaggctcacttgcaaaatgctattgcaacatttcggaaagatggtctattggacacgatgtatattagagactttgaaggtttaagaattgataaagcacaactaaatgaaatgggatacagtacatctcatttccatgaaaaatcaagaattcttactgattcaaaaacgtctgtgtttaacaaagccttttattctaccgttcaaaaccatttaggcgaattaattcttacaatctctaaagcatcgaatgattcaaacttagaaagacatatgtggtatatcgttcgtgatgtactagataacatctttgatcaacttgtacattcgacacacaaatctaatcaagtaaatgagaatcgtataaatgaaattaaagataccatgttcgcgccatttatagattataagtgtgttacaacaatgcggcttgaagatgaagcacatcattatacttatattaaagttaacaaccctttgtatcgagaaaataattaaaattatagaatttcattaatcgtgagctcaaggattacattaacttattaaatacaatctatacaaataagagaataatacattttccatattcaaattattaaaaatcacaaaaaagctcggcactaaaatggtgtgccgagcttttttatcgaataacttattgtaaaccttgtctttcttggttattgttttcattatttttttcgtgtttttgtttccactctttttgagtcattacatcgtcaacttgcatgttaacttcaactacatctaaaccagtaatatatttaacttgttctttaactaattcagttactttacggaagattttaggtgctgattcaccatattctaaaattacttttaagtctacagcagcttgtttttcaccaacttcaacagatacaccttgtgtaacgttgttgccacttgagaatgcattagtgaatgtatcagttaagccacctttcatgtctaagatacctttaacttcacgtgcagcgataccagcaattttttcaacaacttcatcagagaaagttaatttgtttttgaattgaggctcttgattttgttcttgttgtttttgacgctcttctctttctttttcgttaacaccagtttgattgtcgtatgcttgttttgctttattgttatctacagtcataatagattctccttttacttgttattttttatatttttttaattaaattctaaattgatgaattaactccatcgatttaaaaaattcataaaatcttgcttacggtctttcatatacccaatacctacaccaattaaacataaaacgatgataagtattgttttccaaaaacctaacgttaagaataatatcgcgattaatagaaacgctaagaaaccaacgattctccatttaaatacttttaaaaaattaatcacttgttgtgtagagtcttgtccgttttggttatgattgttagccatgatatacctcccttacaacactcgtggaccagaagttttctgatctctcacatttacttctaacttacgtactggcatttctgtaaaatgttctacattctttttaatatccgcacgaattgcttcagttaaagattgtacctgaacattattcggtacgaaaaagtcagttttaatgtcgatataagatttattttttttgttatatagttttgcaactacattcggttgtcttacttggtcatattttgcaactgtatcaaatgcagttttttcaacagctttacgagatacgtaaacatgaccatcatcgaagtctttgtataatccaggttttcgatgcgtaggtttgaagatactaaatactaatataagacctattaatatcaatagtgcagcaagtgaaataagtaatggttggaaccattcaaattgaaggaagtagtcttgatattcagttatacgtccatcttggatatacatgaataacaggaaccccacgattactactattaataagccaaggataaagtttttaagtcgtttcacccctaacgacacctccttagttaaagttaatttaaaaacatattaaatatgtacccatcagattttttcttaaacataataaattaataactttaaatttatttttaatatataagatgaagtaccatttagtaatatattccctagtttttgtaaataaaacctctttgttaattaattttcgtcaatatgttttgaagaacgatattctaatacgtctggatcacgatgtttaattaaaaccttattactatttctaggtttttcttcacttaaagattttaaaagcgaccatatcatcgcaataatgaccacggaaaatggcaacgctgcgatgattaataaattttgtatcgcttgcgtaccacctgtgtaaatcataataattgcaaataatgccataatgataccccaactcactttgacaaatgactttggattaatatcaccacttgaactcaacatccctaaaacataagttgccgagtccgctgatgtaacaaagaaaatcataataacaagtaaagtaattaagcttaatacaaaacctagtgggtaatgttgtagcgttgcaaaagttgctgtttctgtcgcagctttagcaatttcggcaatatgattatcttgtaagtaaattgctgacgcgccgaataccgcaaagaatataaagcaaactaacgccgggacaaaaagtacacctagaataaattctttaatcgtacgtccttttgacacacgtgcaataaatatacctacaaatggtgcccaagatatccaccatgcccagtaaaagattgtccaattttgtaaccattggaatttttgaccgccagacggaatgcgtaaactcatactaaagaaatttgcaatataattacctagaccattcgtaaatgtatttaaaatgtaaagcgttggcccaacaataaaaagaccaagaagtactacaaaagcaagtaacatgttgatattactcaacgttttgatacctttatcgatacctgaccatgctgaccaagtaaataatatagttgcaatgacaatcaagattacttgcatcgtgaagttactcggtacattaaataaaaaatgtaaaccttcgtttatttgcaatgcaccgaaacctaatgttgcagcaacgcctgttactgtagctatgactgccaatacatcaatggcaccacctaaagggccacgcattgctttttcacctaataaaggcgtcaatgtagcgctgactaagccaggatatcctttatgaaagctaaaatatgcaaacacaagcgcgacaataccatagactgcccatgcatgaatcccccaatggaaaaatgaaaactgcattgcatcattaatagcggattgcgtgccagctttatgaataggcgttaatttgaaggcgtgactgattggttctgccgttgtccagaacacaagtcctatacccataccagcactaaataacatagcaaaccaagatggcaatgaaaattctgggtcttcaccttcttcacctaatgtaattgatgcgtatcttgaaaataatatatacacacagacaaataaaataactaaaacgagcaataaataataccaagaaaaatgtagcgcaataaatgaagtaatgttttgcgtgagtttttctaactgtttcggaaatattgcaccaaaagcaacaaatatcgtacaaatcactaacgatacccaaaacactagacttactgatttatttttcataaatacaaaccctttctgtgtaatggtaagttcatacccacaactgcaacattttaatcatttgtaattttatatagacacaattaataatgcttcatcttttaaaaatgatatataaaatactctcaaattatttatcattgaacaacaaagtattttattgtatttaagtaatgcctttctaatgcattattgaattgatacctgcaaagttgccatatttcactttagaatcaatagtcgctaaacacaaaaaataagtcgccctatacagtattttctgcataaggcgactttacttactaatctatatattaattactaatttcccaatcattgactgtttttccaacaatagatgtgcttgatataagttttcaggtgataaaccttcaaaaacttgtgtcgttgttggttggtaatgtcctgattctatatttttcgtaatatcttctaaatactcatgttgtttaatcatatcaggcgttcgatgaattggacgcgcaaacataaattcatgtgtaaatgttatactttttaattttaatgcatttaaatcttgatcttcattaaaagctacgatagttgtaatatgccctaatggttttatcagttcaatcatagtattgtaatacaagtctgtattataggtgcaaaatatataatctactaatggaatttctttttctttaaattgacgcactaaatcctctttatgattcaatacgatatctgcgcccatcttttcacaccactctgttgtttcttgtcgtgatgctgttgtaatgacagttaaaccataccgtttagcaatttgagtggcaatacttcctacacccccagcgccattaatgattaacacggatttacctatattttcagaaggattatgtgaaattttaaatgtatcaaaaaacgtttcatatgccgtaataccagttagcggtagactaaccgcttcattagcgcttatgttgtgtggcgcttttgcaactatagcttctgaaaccaattgatatgtcgcatttgatccttgtctatttggcgatccagcataaaatacaacgtcacccggactaaataatgtaacgtttggtccgatagcttcaacagtaccaatagcatcaaacccaagtacacgaggtgcttgagtgacttccatttgtcgttgttttgtatctacaggatttacactaatgctatttactttgactaagatatcatcgttttctggcgttggctttctttgttcgtatactttaaataaatttccttcttccaatttaaagggcttttcaaatcctatcattttcatatcgtttcacctcatttatgaacttatttcttattatacaaaatagaagccatgtgtgcttatgtcgcagcatcatgactcctttttcatttgaatatataaataattacagacgactttcgtattacattttagacttatttctaccatgttactgaacaaatttgctttagataagaaagttattaaattttggtcaattaacaaagttgatttgtaaaaatgtatactttattattccgtaactttaataacttgtttaccaaagttatcgcccgtaaataaatttttaaatgcacgtggcgcattttcaaaaccatcttcaatggttacttgtgactgaattttaccttcttgaacccatgttgcgagctgttcactagcttctttaaaagcattagcaaattcacttactaagaagcctctcatcattacttgcttcttaataagcgtaccttgaatacgtggtccgatatctgcttcaggatgattatatgacgaaattgcgccacatactggtacacgtgcaaaacgatttaaatgcttaaatacttcatcgccaactgtaccaccaacattttcaaaataaacatcaataccatctggtactgcttgtgctaacgattctgcaaaatcctctttcttataatcaataccagcgtcaaagcccagtgtctctgttaaataatttacttttttgtcgccacccgcaatacctacaacacggcaacctttaatcttagcaatttgacctacaactgaacctacagcgccagatgcagctgaaaccacaacagtatcaccgtctttaggttgtccaatatcaagcagaccatgatatgccgtttgtcctggcattcctaagacacttaaatataaatcaagtggtacatctgtcgttggaactttagtaatttgatccgcttggacatgattaatgattcgccaaggcaacatacctacaacgacatctccttttttataatctgcgagtgtcgaatcaattacttttgcaacgacatggctaacaatcggtttaccaatttcaaaaggctgtacatacgaatctgccttagtcatacgtcctctcatatatggatccactgaaatatacagcgtttgtacaagtacaccatcgctctcaagtttaggcgtgtcaatgtcttcaattttgaatgtatcctcttgaggcatgccttctggtattttgttaaaaagaatttgtttattttgcatcattaatcacctttctttatttgaaacttttacttacttgttacttaagcgttaagtttgaattgtgtcttcgtgatgtctgtatgcaaatacattcttagttgttatatttggacttaagcactgattcattcatgtaacttcaaccacattatatttgctataatcataaatttaaaatgttacgacttagacattttatggaaactctcaaacaatagataatttttgaaaaactctaatattacaagcttttttgcccccgaaaaactagcagttgctttattttttccataagaagtcgatcaactcattagcaacattttcattctcatgaagctgactatgctgtgcagactcaccttcatatttagattctcgataacttttcggactatttcccagtaaatattttaatgatttcgaagaactattagacactctgccgtctgaatgtgtaccatctttcaaatctccataaatatttagcacttcgatacctttacctttataaatatcttttagcacgcgtaattgctgataaggttgattcattcgacttggtttaccatctttatcaactgtaatttcattgacatcttcattcatatttaaaacgccattaaatgtcccagcaatattcacttgtttgtttaactgtggcagtgacttgtcgttaccatatgtcatcatatattgtgcaaatgttaagttccccattgagtgaccgacaaagttgaatttatcgaaattgtattcagattgtaacttagtcagtacatttttaaaccacgcagcattcttatccaaatagccttgtctgttattttcaagttcaattttcacaataggattcactgcatctttacttagtttccctttaaatgtcactgcaccatcctttgaaacgtaagcagtgatgatatctttagttacccctcttttttctgcttgcttcaccataaatttttcagagttggcactaccaccaaatccatgtaaaaacaatgtcggaattggctttttaacaaattgctgttgttgtattttaaatgtttgtgcctgtcgttgactaaacacaaccgtaataatagtgcctataataatagcgaccgctaacaatgtcgtactaattacaaaaattttcttcacacttttaactcccattcatgtcttttatttaagtataaaggatgtgattaaaaatgtcctttagttgattttgaatacatcattaactttaaagatgactttggaaaattgtccgttaacgtttgttaattgattgcttatttaactttcaatcgtgtgtctcccattgattaatataaaaatatgtatatgcatgtttaatttttctctttttataaataaagacctaccagcacacgactgataggccttttaatatcttttattatttaatttcttttgtttcggctaactctttgtaccaataagcacttttcttaggatagcgttcttgagtctcaaaatcgacatagaataaaccatatcgtttttcataaccatttgaccaagagaacacatccattaatgaccaaataaagtaacctttaacatttgcaccatctttaatagcatctgcaataacgtttaaatgttgtcttacataatcaatacgtgcatcatcatgaactgttttttcagattcaataaattcatctttatatcctaaaccattttcagtgatataaatcttatgatagttaggataatctttaacaacacgcatgatttgatcatataaaccttgaggatagatcatccagtcccagtctgtgcgaggtacgtcgacatcaaattcacgttgaccgacacctttaagttggtatttagaaccgcctttatcacctgtcgcattatgcgtaatttcagattctccatcataacctctcatccaatcactcatgtagtaattgatacctaagaagtcgtttaaatctttggctgcatctaaaatggcataatcttcatctgtaatgtttaatttaccgccattaacagataagatatgttgcacaccttccatcgtttcacgagaatactcacctaaatatgttgcatctaagatgaatttgttatggatgatatcttctaattctgctgcacgaacatcttcaggatttgatggatcgaacggatattttgttggcaatgcgtgtacaacaccaatttctccttgatagccgccatctttaaataattttactgctcttgcatgagcaaccatcatattatgatgagattggaaaactttttcaaaatcatatttaatacctggagggaatttacctactaaatattggccatcaccaattggtccaatttcattgaatgtagtccaatattttacttctgggaattctttaaaacaatattcagcataatctacaaagtagtcaatcgttttacgatttagaaaatcgccatctttgtgtaacacttctggtgtatcaaaatgatgcaatgttacaaatggttcaacatgacgtttatgacactccgcaaataacttatggtaatactcaacacctttagggttaacttcgccatatccatttgggaagatacgagaccatgcaattgaaatacggataccattaacaccgaatttttcacttaattctaaatccactggatatctgttataaaaatcactcgctggttctgcagtgtaccaatagttttcttctaaatacgtatcccatgctacgcgacctttaccatccgtatttgtcgcaccttctgcttgatatgctgctgttgctccaccaaaaataaaatcttcaggtaatgttttagtcatatgaaaaactcctattcttaattttcaaattgttgttgaacgaaatcaagggctgcttggccatctcgtgtcaatttgatatattcagcaccttgagtcttcgctaatttaatacctaatctatctgtatcttgcttaatatcttcatagttagacgcaacttgtggcgctaaaatgattaattggtactctttcataatgtccatatgtgcgccatatccgccagctgccgctttcactggcacatgatattcttcagctgctttattaagtgcgttggctaataatccacttgtaccaccaccggcacaaagtactaagacatttgtttgttctgtgatatttgaagctttagctgcatcgtctgatacaccacttgccgctaaaattgaatcagcttttttcgtatcaaagtttgctgcaactttttcttttaaatctgaattactttctttacgtccttcttcttcatcaagaatttcactatcataaacttttaggaatgggtagtaaataataatatctacaacaattaaagtaatcgctagtacgaatgaccataaaccaaatccagtacccatgatgatgccgagtggacctggtgttgtccatggtaagttcacactaaaactgttcattcctaacacttcaacgaaaagtttaaatatccatacgttcacaattggcgctaatacaaatggaataaagaacacaggattcaatactagtggtgccccgaataaaatcggctcgtttacaccaaagaatgttggtacaacagatgcacgtccaatcgctttgtttcgtttagatttcgtcatccacataaacataaatggcacgaccaatgttgcacccgtaccaccaaatgtaacgataaacatttgtgtacctgatgtaataattttatctgcgtgttcaccagcttgaagcaacttgaagttcgcttcgatattcgcatatgtaatggctgcaattgctggttctactattgatggaccatgaattcctacaaaccagaataatgcaaaggcaccaaagataattgtgacacctatccatccatctgctgctgtaaataatggttcgaataattttaaaataccttccgctacatttgatttaaagctgttgcgaatgactaaatctagtgcataaagaatgatgattaccgctgaaaatggaattaagtccttaaatacttgtgaaatattcggcggtacttctttcggcattttaattgtaatattgcgcttcacacagaagttataaacaataacagttacaaatgctgataagaatgctgttaataaacctttagttcccataaacgcacttaagaatccaccatctttggctggatcagaagctaagaacaagaatccacacatcgctgctagcattgtagaaataaagttaatttgatttgtactttctagcttacggttaaatgaatctgttaaagatttcgctgtcgttcctgctactaaaaatgctacaagccccatcgtatagttatatggtttcattaaaatggcttccatgcctttatcccatttaaaaccaaatatatttggcacgtatgcaattaatagaaagatacttgagaataagatgacaggcattgcagaaataaatccatcacggatggctcttaaatatatgttacgtgataatttctcgaaaaatggcttccctttttcaatttgtgcgatcaatttttgcatcattgtcatcaccctcttttataaaattctaataaatgcttcattaaatctttcagtaaaattgttgtcattaaatggtcttgaccatgcatcatcgtcacactgtatgcaatatcatcaccttgcgcttctttagctaataagcttgtttgtgctctatgcgcttcagcaatgcaattgtttccttcttcaatcagtgcatctgcttttgcaaaatctccagcttgagctgctgttaatgcttctaaaaacttagaacgtgcatcccctgcaaatgcaacaatttcaaaacctaataattggacttcttctctattcatagcattaatccccttttatacttattttctttgtttccaagatgtcgcagtatcttttaatactttatttaagtcatcaatatttttgaaaccagttgtacgtaaccattcacgagcagcatcttcaccttgttcaatgtatacttgaacagcaccagaccatgtagcacggccacaaagtacaccgttgaatttagcaccagcttcgtgagcaaattttaaagtttcttggaataattccgcagaaacaccagcacttaagtaaatgtatggtaaatgagttgatgcatcttgatctttaaagtgttgtgccgcttcctcttttgtataaaccacttcaccttcagcaaagccttctacatacttcatgtttactggtacttcaactttcaatacatcaacgttaaagcgtggttctgagaacaatttcattgcttcgttaacctttctaggcttaacttttgcaaattcaacactaccgttatcaggaatgttgtcatcgtatgttaatacttctaaaaagaatggaatatcttctgcaacacattctgaaccgattctttcaatatatgctttcttttgaatgttaatttcttcagcatcatcaacatcatagtaaagtaagaatttaacagcatttgcaccttgttcttttaaacgttttgcagaccactctactaaacagtcaggtaaacgacctttagcgtttacgtcatatccagttttttcataagcaagtaataatccacaatctttgttacgtgcatcagaagctggtaaaccgtattcaggatctaataaaattgaagatgcatattgcgttaattcttccgcaactaatacttttaattgttcaatttgagctacagttggttcttcagtttgatgttttgccatcatgcgttttaaagcaccacgttggtcaaatgctaatgcagaaatgataccttcgttattacttaattgttcaattgatgcgattttttgattcgattttgacattttttacacctctaaaacttcaatttgattgaataaatcatcataattatttaaattgacataacctgtttgtgcttcttgcgcattcagcatgcctaaagtattggctttttttagtaaatcgtggtcgttttcatgattaagaattgctgaagtaattccagcaactgtagaatcacctgaaccaaccggatttaatacgcttattttcggaatattcactctatagaatgtgtgattgtgcttagcgaacgcaccttgtgcacctaaagacacaataatccactcaattccttcgaataagggttgtgaaactgcttgtttcaaactttctaaactttcatcaagtggctggttaagcaactgatataattcagaaatgtttggtttaatgactgttggtttgtatggattttccaatactgtttgtaaagttgcacccgagcagtctaatatcacaggcacacctttgttttggcatcgttcaatgatttgtgcataataatcttgatttaatccttttggtaagctacctgaaatagcaactgcttcaactttttctagtaattgctcaaaatgtttaataaatcctgcagcctcttgattatcaatctccggtccctgctctaaaatttctgtttgttgtccttcatgtaaaattgcaatgcagtttcgtgtttcacccttaatgttataaaatgcatgcttgatgccggcatgatctaattttttagcaataaattgacctaattcaccgccaataaaaccactcgcaaggactggctcacctacttgcgcaagtactcttgttacatttaaacctttaccaccagctgttttacttacttcttgaacacgattaacatcatctaatttcaatgctgttaatgggtatgaaatatcaacggatggatttaatgttaaagttaaaatcatatgtgtcgtcccttaatcgtggtattcgcctctgtcccatttttctaagaattcatcaaagaaatgtggatcagcttgatctgcattgcttgtttctaaatgtttaattttagcgattaattttttgttctcttcagttggtttatattcagcattaataaatgcatcgataatatcgcacattaataactcaccaataatacgtccaccaaagccaataacgttcgcatttaattcttctttagcatatagcgctgatgtcatatcacgtactagtgctgaacgaacgccaggtactttatttacagcattgttaataccaacacctgttccacaaatgcaaacacctaagtctgcattaccgctaacaacttgttctccaacttttttaccaaaaattggataatgtgttcttgtgaaatcgtatgttcctacgtcaatgacttcatgtccttttgattttaaaaattcagatacacgcatttttgtatctgtaacaatatggtcgcatcctaatgcaatcttcatagtaatttttcctccttagcacattttattaagcatatctacgcggatttggtgtctaccaccatcgtatttaccttcaacaaaacctttaacgacatttttcgctaatgtgtctccaacaatttcagatcccatagtgatcattcttgaattgttatggcctctagtcatatatccagagcgttcatctgataattcagcagcaatcatgcctttgatttttgtagcaaccataaagctacctgcaccaaatgcatcgataacaatacctaagttaccttcttgactttgaacatcttttgctacagccaaagttgcatcaacaaagtcaacttcctgtccttctgttacgtcaacaacgtcatatttattgtctaataagtatgatttgatgacttcttttaatcgtttgccagcttcatctgaaccaataataatcgccataataagactcctttttactttaattttgaaatacctttcttaaaatatgacatatttatttgtaggttatgaaaatcttgagaaaaggctttcaatttgattacgtttaaattataaacataaacaaacaataaatcaacataatatgtttataatctgtttgtttatgacatattttcaaacaataagtgaacattcttattgtggtgttgttttaattaggtattcgtctgaaattgtagtaaaaatttgtcggggttcccgtttacataaatttgcaaaaaaatagcccataaatgaatgcaaattcacattcacttatgagcatatagacacatattttaacaatgcagttatatttttaatttagtcgactacttcaatatatgttttaatcgtttctactttttcttcatcttcatagtccatgaccactgcagtcaattcgtttaactgacaaaatgatgtaaaatcttctttcccaactttcgtatgatcaattagcaagtatttttcaattgaattacttagtgccaattgttgcgtataagcttcatctaatgtagatgtcatcacagcacctttatttactgcgttactactaaagaacatcttgctaaatcttagtttttctaacatggcattcgccatttcacctacaaatgcttctgtaatatggcgcatttcaccaccaattaaatagacacgaaaatgtgctgtttgtttttccaacaaaattttatacaccggcaaacaattcgtaataattgtgagcgtatgatgattgacttcttctgctaatagttccactgttgttcctggtccgaaaaacaaagtatccccatcttcaattaatgatgcagcttttctagctataaatcgtttttctgcaatttgacgggtatgtttttctttatgcgatatttctttatactgaaatgttgaattactgcgtgcaccaccatgaatcttcgttaaaatccctttattttccaattcaattaaatctcttcgaactgtcatatcagacacatttaaaccttcgacgatttcattcgttcttatcgtgccctttttattcactagtttagcaatttcgtccaaacgttcatgtttattcaatgtaaaattgcctcctttatttaggcgatgggtcattatcctttatgtttagacatcaattttaatatacatgcttattctataataaaaattgcgtaaaaactaatataatttaactgttcgattatatgtataattcatttttaaaaagaactgtttaaactgcgcttttgataatcgtaaaatgaatatactataataaaagcaaaagacgttataaatcattcattattttgatggggtgtttaacttgaaacatgatttagagacactaaaacatattatagatagttcgaatcgtattacattttttacaggtgctggtgtatctgtcgcaagtggtgttccagatttccgttcaatgggtggcttatttgatgaaatttcaaaagatgggctttcgccagaatacttgttaagccgtgattatttagaagatgatcctgaaggttttatcaatttctgccataagcgcttactatttgtcgatacgatgcccaatatcgttcatgattggattgcaaaattagaacgtaatcaacaatctttaggtgtcatcacgcaaaatatcgatggtttgcactcagacgctggaagtcaacatgttgatgaattacatggcacgttaaatcgtttttattgtaatgcatgtcataaatcttatatgaagtcagatgttattgatagaactttgaaacattgtgataattgtggtggtgccattcgaccggacatcgtattatacggtgaaatgttagatcaacctaccatcatacgggcattaaataaaattgaagatgctgacacccttgtcgtactaggttcatcactcgttgtacaacctgccgcaggattaatatcaaattttaaaggcgacaatttaattattatcaataaagatcgaacaccttatgataacgacgctactttggtcatacatgacgacatggtttccgttgtaaaatcattaatgacagagtaatcagtacgtaaaaagcatttcccgagtaacagggaaatgcttttaattttgaagttgcgtattcattttttgagcttggaattcggagtttggttttcggaattcgacgtttggaattccaaattaaaatgagtgagaaattttatttattgcgtgcttaacgatttggttttgtagcgatttttatttgatgatttgtgttttatttgatgttgggatgctacttttaatggtttgtcatttgttagattaaaaaatcagatatcttcgttatcaaattccaatattaaatcattatatttttcagaatatcttgcataatcttcattattattaaaagctaaccatagacctctatcatcatataaatgatatattaagtttttagtattgttaattatatatatttcagaataattatcattctgattgatatttggaactaaccctttaaagtcttgattggatatagcttttaataattttttatattttatatcttttatggaacacttatatgaaaactcctcgcacaaaatattatcatccttctcctttttatattctttaaagtaatacaattcatctattgttaacgatgtaaatttttttataacatttgttctcttataaggttcattataaacatatactacatgaaccaaatttatagaatcagaaggcgaaaacaaatcttcaaaaatgtttattgcattatcatatacagctaaaaaataagtattattgatagttttaccgtcctccaaaaactggtatttatcgccacttaaacttaaatgaattgcgttttttacctttctaaaattcaacttttttatatcaaaattatttatatcaaagcacataatttacaacaccttattcccttaagatttttccttctttagttaaagaagctattctttttcctttgttatttattaacttccaataagaaccaccatatgattgccctttatttttggaaatagtccatttaatttttggatatctccaggtaggatttttccctttaagcttttgaataaatttaccaatactcacccccttatcatttaacaaacttttattaacgtttttggctatattatgagtctttactgcttttagattgtaaaaataatcgtcatgaataatggcattttccgacattcaaattttacaaagtacattgtcatatgcataatgatacctgtaattaatgtaataatagaaaagggtatatatgtcatatcgccacctgctatacaacttattagataattaattccaagacatattaattatctaattataaccttaggtaagttattgcataatataaaaattcataatagcttatttgcttgctcctttcactttttaagagtaataaattaacctgaaacatagactttaacatccaagtttcaggttagcgtaatgtaaattatttactttgttatattatgattaaacatctaattctctgcttgtaagtgctttaatcatctctggatcagcatgtgagaaaaattggctattactttcttctaatgtcgcaatttgttgtttatcttcttctgtaagttcaaaatcaaatatatctaagttttgagccatacgttctggattcactgattttgcgagtacaacgatgtcacgttctactaaccaccgtaaaataacttgtgcaattgatttgttatatttatctgcaatggcctgcaacaattgattttggaataattgatttttaccttctgcaaatggtgcccaagcttctaccacaacattttcttgttgaagtgctgcaacttgttcttcttgttgatggaatggattaatttctatttggttcacttgtggttgaatttgattgtgaatacctaaatctacaattcgatcaacgccgaagttagatacaccgattgctttaattttaccagtttcttttaactcttctaatgcacgccatgagccatatacatcattgtaaggctggtgaataagcactagatcaatatagtccaaatttaatcgttgtaatgatcgttcgattgatttgatagtatcttcatagttaacattttcaatccatactttagtcgtaatgaatagttcacttctatcaatacctgaagcttcaataccttgacctacttcagtttcatttaaataactttgtgctgtatcaatatgtctataacccgctttaattgcttctttaaccgcttctgctgtttgttcttgaggaatttgaaatactccgaaacctaatactggaatctttacatctttacttatttcaatatgattcataaaatgaacctcctttatcttgtaagtccactataaaccatggagcaaactctatagcaagccagaggtttactttctctcccaaagacgttcaacattgtcatcatgattatcactagcattgattttagcaatatgattatcataattatcaattttatattgtagttaatctctcgcatcatgaattgtctttaagttttcatttaattcttcgagttgcttatttaaaatttgcttttgctgtgcttgaatattttcatttttaggaagctgcgctaacctacaaaattcgataagcgattcaatactgacgcctgcatttcgcaaatttttcactaaataaatccaatttaaatcattatcattgtatattctatatccattttcatctcgattaacaggtggaatcacaccaaccttttcataatatcttaaagtgtcttgagatatattcatgagcgctacgacttctttagttttcattgtgactatcctttcagttatgtttggttgtctaaagtaatgttactttatatattgtcatcttcgtttgaatacttcttattttattactcaaatttaaatttgtctcttttttaacattttacatttcatcgtttttaattactttaaaaattgtataacttaaatatttaaaatgatataataacaaagattgataatatttaatttttaaaaaatattttcgttgcaatttttgggtgatgctgaaaatttgggtgatcgattgtttatatgcatcaacattctttgtggattgtttgacagtagacagtcaattgtatacgttaacgaattttgaaaaattgaatcattatttaatcataatattcattgcgcacgcgcaacacaaaaaggagacatgtcaatgacatatagaatgaagaaatggcaaaaattgtccaccattacgttattaatggctggtgtgattactttgaatggtggtgaattcagaagtattgataaacatcaaatcgctgtggctgatacgaatgttcaaacgacagattatgaaaagttgaggaacatatggctggacgttaactatggttatgataagtatgatgagaataatccagatatgaagaagaagtttgaggctacggagaatgaggcagagaaattactcaaggaaatgaaaactgaaagtgataggaaatacttgtgggaaagctcaaaagatttagatacgaagtctgcggatatgactcgtacctatcgtaatattgagaaaatctcagaagcgatgaaacataaaaatactaaattaaaaacagatgaaaacaagacaaaagtaaaagatgcacttgagtggctgcataaaaatgcatatggaaaagaaccagataaaaaagttgctgatttgacctcaaactttaaaaataaaacttctagaaataccaacttaaattggtgggattatgaaattggaacacctagagcattaacaaatacgcttatactcttacaagaagatttcactgatgaagaaaagaaaaaatatacagctcctattaaaactttcgccccagatagtgacaaaatattatcttctgtaggaaaatctgaacctgctaaaggcggaaatttagtagacatttctaaagtaaaacttttagaaagtattatcgaagaagacaaagatatgatgaaaaagtctatagattcatttaatacagtcttcacttacgcgcaaaattctgccactggaaaagaacgtaatggattctataaagatggctcttacattgatcatcaagacgtcccatacactggtgcttatggtgttgtactattagagggtatttctcaaatgatgccgatgataaaagaaacaccttttaatgatagtaaccaaaatgatacaaccttaaaatcatggattgacgacggatttatgccactcatttataaaggtgaaatgatggatttatcaagaggtagagctatcagtcgtgaaaatgaaacgagtcactcagcatctgcaacagtaatgaaatcattgttgagattgagtgataccatggataagtctacaaaagctaaatataaaaagattgtcaagacttcagtagagtcagattcaagttataaacaaaccgattatttaagctcttattcggatataagcaaaatgaagtctttaatggaagacagcactatttctactaacggtttaacacaacaacttaaaatatataatgacatggatcgtgtcacctatcacaataaaggcttagactttgcatttggtttaagtatgacgtcgaaaaacgtcgcacgttacgaaagtatcaacggagagaacttaaaaggttggcacactggtgctggaatgtcttatttatacaatagcgatgtgaaacactaccgtgataacttctgggcgacagctgatatgaaacgtttagcaggtactacaactttagataatgaagaacctaaaagtacggatgttaaaaagtctagtaaaacttttgtaggaggaacaaaattcgatgaccaacatgctagtatcggaatggattttgaaaatcaggacaaaactttaactgccaaaaaatcatatttcatattaaacgataaaattgtcttcttaggaactggcattaaaagtactgattcatcaaagaatccagttacaacgattgaaaatcgcaaagcgaatgattataaattatataaagatgatacgcaaacaaccaattccgataatcaggaaaccaattccctctttttagagtcaacgaatagcactcaaaacaatataggttatcattttttaaacgaatcgaaaataactgtaaaaaaagaaagtcatactggtaagtggagtgatataaataaaagccaaaaggatatacaaaaaactgatgagtattatgaagtaactcaaaagcattctaatacagatagtaaatatgcatatgtgttgtatccaggcttatctaaagatgtctttaaatccaaagcaagcaaagtaactgtcgttaagcaagaagatgacttccacgttgtgaaagataatgaatcggtttgggctggtatcaattatagtgatagcgctaaaacttttgaaattaataacactaaagtcgaagttaaagccaaaggaatgtttattcttacaaagaaagatgataacacttatgaatgtagcttctataatcccgaatctacaaattccgtttcagatattgaatctaaaatttcaatgactggatactctattataaacaaaaatacgtcgacttctaatgaatccggcgtacgctttgaattaactaaataagcaagaaaatctcggcactataccatttttatagtgtcgagattttataagcataactatcattcaccttgtaatccgcagaccacatctcctttgataagttctcgattatttataaatcgaatttttaaagatgtacatgcttcaatattcttatcattcattacttgaaaatgtatatgaggttcagtagaattgccagaattcccaaccttcccaatgatgtcaccatatttaacattttgcccctcattcacaatgattgaatattgttgtaaatgagctattaagctatactcattttctgcgtgcttgattacaatataatttcctaaaaactgtgattccttcgtacttccaatactgttgtcttgaaccccattcactactttttcaactgtaccatttgctggcgcaatgatatcttttccaaaacaaaaataatcagcatttacttttcctaggttcttatatgttttatgattttctttaataactaaatcaatagcatacctttgatgtgggtataaatagtgataattatataattcattatctccaccccaaaaaacctcatagcaatctgttgtcggcactgcgtattttaaagtcgtttcattcttaatcgcatcataattgattaacggacgcataacaaatccgataatactattatctttccatgtcactgccactccaaattgatttgctttatctatccatatttgctcaatagtaccatcattttgagtacacacttttaattcatgtacatcagactgccatgtataagatttgaaaagtttcctaaactgccaataactaaactctcgcttcaaattttgatcaaaaatcttatatattttcctgctcttacttttatttaaataatccccaaagtttgttttattcatatatacttaacctcttatattaattttggtatcaattctttctccagttcctgcgtcatttttgcgctacctgaatcgtctacacttaattggacaaatcaacatataaataattttttaaaactaaagtgtagtcgattcactatattttctaatcatcccttaaatattaatatttgtacttaaaaagtatacatatcactcaaccaatcaataatcatacttaccttcaacaaattctttaacatgcagtgttatcccttgataatatggatattttgttaatctaaatttctgctttaatgcttcatctctactattcgacatcaaataggcatgttcaagatagcttaaatatgcttcgtcattgccgctatctccaaaacctaatattgattttactggtatattatatttcttcatcagaaattgagtagcatatagttttccagcatttgacggtgtgaagtcaatatcatacgcattttcaggatcaccagctaatggattgcttcgactaaatctcgctgtatagttttggtcatttgcgtatctgacaagtacttctagaatacgcctatcattgttgtgattacctgttgaatgaaaataaaaattataatgtgtttcattaccttcaaatgctctttgtggaataaattcgacattatattgcgcagaaatatgatgtaatatatcctcaatatcttcaaataaaaatggttcgctcaagactttctttttatatgtttctgattcaacatattcgccattattccaagtgaacattttagaactcaaatcagaaaagatatgtaatggtttaaacgtcatattaacttgatccattttatccatgacactttgaaatgtacttcctgtcaatacaacagtgatcacttcattattattagttaatttttccaacaatttttccatttctcttaaatgacttaaatcttcttcatttgtattatgtttaaaatatgtttcatcaaaatcaaacaataatagacgctttgacatactcattcctccataatattttaatgaatttatctataacttaaatacactataagtctcaattaaaagtataagatcgactatatgcttttcatgcttattatatacaactaatgaatccctataaactaaaaacattgcttaccacttttcaaaatacacgggtcatatccctcgttaaaaactattactaaaaatcaaaaatataaaaaaatcaaaaagtatgttttaaactttatgaaacgtgttatataaatagtgtaatataccacaactttaaaaggagattgagatatgaaactaaaatcatttgttactgccactttagcattgggcttattatcaacggtcggagctgcattacctagtcacgaagcatctgcagatagtaataacggctataaagaaatgacaatggatggttatcacactgttccttacacgatttcagtagatggtattactgcattacatcgaacttactttgtttttccagaaaataaaaaagtactttatcaagaaattgacagtaaagtaaaaaatcaattagcttctcaacgtggtgttacaacagaaaaaattaataatgcacaaacagcaacgtatacacttactttgaatgatggtaataaaaaagtagtgaatctaaagaaaaatgacgacgctaaaaattcaattgatccaagtacaatcaaacaaatacaaattgtagttaaataataatttgaaaatgaaaatagttatacagggcaaacgctgaaaaattgcgtttgtctttttagtatgaaatgaataatcgaacttgtaatttattattgattgcttctactgacaatagattagattggcctatactaaagtaaattctatattaacgtcttccgtaatttataatctaacataacagcaaattacaaatagctagaacataaataaatcccctcactaccgttaatagtgaagggatttattttattacatagacgtatgctctatgacaaccatgcttaaccgtattacacaaccttttatcattgctaaatttccaaatcgaacattatgaagtcaatgcttcaatttttataatccatcattacatttccgcattcattattcagcttctctaatttcgtctgcaatatctttatagtcaatatttgcatttatgaaatcttcatcttgaattggaaaatgctgttcaaatgtttctatattttggatttctaccttaacatcttctacttcaaaatctaagacatgtccaccaaagttacgatcatcatttgcaaagtgtacatggaatcctgctgacccgataccatggaatagttctggtgtaaagaacccaacgactgcgcctttgacgtacgtttcagtttgttcaggttgtcttctagctgagtcaattaaacgtgtataaggtggctcttgtgccggcatcatacgtacatgcatttttttaaataagcctgaaatttttactgcagaaaataaattttcactcaacatcttttccttaatttctgcaaaaactgcttcagaagatttatctttcgtttcatagcttgtatctgctacgaatttagttacagttgcatatggtgttaactcatcaccttttaattccacaaattctttatgttcatttgcatgataggcttttccatctaaaaagatgacctcaccatttgaacctgttagtgtagcgatacctaaatcaccatgttgcaataattcatttattgatgcagttccttttaataaacctgccattaatgtgcctaatgtaccatgttgatataaaacactagccataaaatttcccactcctcattaacatttatctttgttttagttaaatacgtcaggtaacatatttgttgaaagtttgatattatctttgtaatttacaggtatatcaattaatactggaccatctgtttcatagccctctttaattgccgcttctaattcttcttgattagtaactcgtaaaccttttgcgccaaatgattcagcatattttacgaaatctacaggaccgaagtcgacacctgatgaacgtttatatttcatttcttcttggaattcaaccatgttatattttccatcgttccaaataagttgaataatgtttagatttttacgtacggctgtttctaaatcttgtgatgaaaataaaaagcctccatcgccagcaacggatacaacttgcgtattagggcgtacaagcgcagctgaaattgcccacggtaatgctacaccaagtgtttgcataccgttactaaataataaatgtcttggattgtaacttctgaaattacgtgccatccaaatatagtgacttccaacatcaactgtcactgttgtatcatcagttaataccttttgcatagattcaataatttcaactggatgtagaattccttcttcatgcgtcgctttaataccagtttcttcatcaatatgtgttcttaattgttctaattcgtctaaatgttgttgatttataaatggctcatctactttttcagaaatcatttcaatcgttttagcaatattaccaatcaactcttttttcggttgcatataattagtaatttcagcttgaacttcgtcaatattgataatttgtgtttctaattctttattccagttactagcttcgtattcaattggatcataaccgattgtaacaactaaatcacttttacgtaataattcatcaccaacttgattacggaataagcccacacgaccgaagaaatgattttctaattcacgactaattacacctgcaccttggaatgtttctacaactggtaaattcgtacgctctactagcttgcgaatggcattcgtctcgtcagcactagaacttctcataccagctaataaaacaggaaatgatgcatttttaatcgcttcaatgacatcattaatatcttgttcactcggtactcctaaatttggtttttggcaaagtgatatagctttagattcaactggtgaagaaatcacgtcttgcggaatactaataaaacttgcgccatttttccctgaagtagcaatacgaattgcatttgtcataacttctgataatgattcaggatcttgtacttcttcactgtattttgatgagtattttaatagcgcagcattatcaatactttgatgcgttaatcgtaataaatcattacgtttcacttggccgcctaacgccaagacaggatccccttcagatgtagctgttaatagtccagtcgttaaattacttacaccaggaccacttgtaacaagtactacacccggtttgcctgttaatcttccaataccttgcgccatcattgcggcgttttgttcatgacgagtgacaataagttcaggaccatcatcaattaaagcattaaatagatagtctatctttgcacccggaataccaaaaacatattctaccccattatttttcaaagtatcaataaccatatcggctgcagtgtactttttatcagtcatttatattcatttcccttcaaatgtgatgtgtagatgtgtattacatgtaattacattgtgatttgtaatctaatgatagttatgtaaaattaatgatatttatcaaaactttacatatacaattagatttgtgatacataaaaattgccttcagtacattatatatcctttgtaagatgaataaaaatcgttatttgtaatactaagtattccaaaaatgcatgagtagattttgaagggagtgattatgagggatgttggattgattggtgtggaggattgttagcatatttgagaatgaggtctttagtcaatgacggtttgaaattgtcgttttatggcgggctgaaaatgctgttttatgacggtttgaaaatgctgtttttggcgatttaaaattgtcatttcgataaaaaaagccacagcaagacttagatctaactgtgacttatacatttcatacttatatttatcgattgtttttatagttataaatgatagatgcagttcctaaacacattaagaagataatcattaagtatatagaaaagttatttgttttaatataaaacctaaaaagtagaaacaccagcattgcaacaataaaataaacaggaataaaagctttcttccaaaatacagaatctatcaattaagtcactccttattttgataacactcttaaatcatggttcttgagctatcttccgattttcatccgatagccctttcccttgaaccactatgattaaaacattattgtccgtcctccgcaagctaaatgacaatttaataatgtacacttttgattgtgtaagcatgttcaaattatacgtgtaaatcaataattcatagttgaatttattctattccttagacattaaataaaggaaaattcattatactctacacattccatattccccacacaaacgtaaaaaaacacctcgacataatatcgaggtgttttgtatatatcgtccgacaattaacgttttgagaattgaggtgaacgacgagctgctttaagacttggttttttacgttcaaaaaactttagggtttcgtacaattgtatagactgtcgtaagccttgatactaaaggattcctaattttttcgttcacatagaattgcatcaaatatcacctaggggtaactaaagggtaactaaataaactgctgtccggtggtatatactctcgtatcgtccggttatcgtccggtcgtaaatatattgatttatcaatgtttttatgtatatcaataggttatcgtccggttatcacttgatgaatttattagtctctaattaaataatatctagttcccggacctctaccttcagatccgataatctctaatttctttagttcagcaattaactcagatgtataacttttttgaagtcccattgtttcttgaatttctagcctacttgctaacttaccatctgacagaaattctacaatctctgtcaacttctgattagtaggtattttatttaacttgtaattcttattaaatagtactactcgaaaatccgcctctttactcgaaagctcacaaaactcttgatatcactggtttctcatgattttttaatgtttttattttgagttactcgaaaattttcctctttactcgaaagctcacaaaacccttgatatcattggtttctcatgattttttaatatttttcttttgagttactcgaaaatttttctctttactcgaatccgagtaaataatatgttctctttggatcattcttacttgatccatgtgtcgatataatattcatttcctctaattctttcaatctttttctagcagtaggaacagacctttgaataatattagcaattttagatgctgttagttcgccttgattatataaatgtctcacaattaattcttgttgctcatttaaactttcaaataattcaggtgttattatattactcactctccctgtttctctttttttccttgctattatgttattcttcaaagctagttgtactgaactattattaggctctgagtatacaggatcatctaaaaaatattgcttcatttcgtcaaatatacgtcccacgccctcatttgattctctcacccatttatattgagttaatgctgcagctaattttggattccttgaatatctttcttctttaatattctctaacgtaacagaagcaggcagtgcacccgggctactaatttctaatctgtcgtcaaacatttttattcttatatgatcgccttgattatcatatctgcgatgtacaatagaatttatcatcccctcaaaccaagcaaattctggatattctggcaaagttacaaatcttccctctttacctaaaaaagtatattcacgtaattgtgtattgataaaggctctcgcttctcttattgctactggcaaagctttatcaaaagtaatatcttttacaatgttaagtcttgtcccagattcttcttttgttccttcatacctcataaatcgaattctagcgcctggtaaataaacattgatgttattactaaacaataacaaacctgcaactgtcaatttaccttcacgcataaatcctctagcttttaataatttttcattatctacgtttgtattaagtaattgcttaaattcatcaactagttcttcattcacatcttcaatactagaatactctactaattcttcttcgaatcttcgtgaaccacggtcgtattctagatttgtaatttgattgtgtgtcagttttctacttttatcgttaatccttaaatatactgaatcatcttttaaggtgattatggcatcataactgggttcaatgtcgaaaataagaatttcatccatagttccatcgcgtttcttcacttctattatttcatatgtatatttaggtattctatataaatgttcgaaaggtgcttcaatataaacctctttcttttttgcttttgaatgattaaatcccgaaatttctccattatcttcaataccaattaccagtttgccaccttcagcatttgcaaacgcactaatgtgttgagcaacatctttaggatttatagatgccctctttcgatctagaagctgtccttcaacctcagtttgcaaatattcaatatacttactactagtcatatataaacctcgcaatctcgcatcttattgactttattataacattcaatactatatctatcgaatatcattacaacctctatctgcttgtcgtacgaatcccaaagaaaaaccaggtcatttcatatggtttcctaaagtttcatatcattgaattttaagcagaattgaaacaaattagttcctctaggggtaactaaatagtatctaaatgactctataaaaacacaaaaaacactctttggaataatccaaagagtgctgtaaacgtttcttcagttgaacacaaattgctgacgcaatttgcgaactccatctgtaagcgaacaagttcgcaacagctgcagcttaacgttttgagaattgaggtgaacgacgagctgctttaagacctggttttttacgttctttcatacgtgggtcacgagtaagtaatccagcgcgttttaaagaacctctgtattcaggatctgcttctaataatgcacgagcgattccgtgacggatagcttgagcttgtccagtgaaaccaccaccatgtacgttaactaaaacatcatagttacctttagtttcagttacatcaaatggttggtttaagtctaaaattaatgattcgaatggtaagtattcgcgtacgtcacggttattaactgtgatgttaccttcacctggtactaaacgtacacgtgctactgagtttttacgacggcctgtgcctctatattcaacttgtgccaaagtcatttcctccttctaattaaccacgtaattcgtagttttctggttgttgtgcagcgtgtggatgttcagcgccaccatatacaaataattttttaccttgtttttcgcctaaacgagtgcttggtaacatacctttaattgaattttcaattaaacgttctgggttagttcttcttaattcaccagcagtgattgatttgataccacctgggtgatttgagtgacggtagtaaactttgtcagtttctttgttaccagtaaattcgatttttgatgcattaataacgattacataatcaccagtatcaacgtgtggtgtgtaagttactttatttttaccgcgtaagatagatgctacttctgatgataaacgacctaatgtttggccttcagcatcgataacataccatttgcgctcaatgtttgattcatttgccataaatgtttgacgcataataattgtcctcctaaaaaataaatgcttctattcaagctataaacagtttcataacctaatagatgatttcatttgtttcattttaaaacgtttcatttcatttattttgttaactgttgttcgtttctgcttatatatcttgtaacacaataagtttccggggcttatcgtggggtggatataaaacaataccgttaataatcttataatttcacaagctttttgtcaatggcaatcagtcattttataatgattttttacgatgtattttgatatcgttaccaaagtcttttaataactcattttcatctaaataaattttctctaaatataatccttcagccggtgcagtgaaaggtacattcttacgattctttgattcaagaagttttggtacatctgatacttcatgtcgcccttttccgacttctattaaaaatgcaactaagacacgcaccatgttatataaaaatccagatccagtgacaatataatcaaagccatcatctgtctttacaatttcactttggtataatgttctaaccttgctttctacttcagttttttgcgaacaaaaacccgtaaaatcatgtgtacctatgaattgttgtgccgctctgttcattttgtctaaatccaatggttcaggaataaatgttttcaaaccactttgaaatggatcgcgttgttgtgcttgatatactttatatcgatagcgtttaccgacacaatcgtaacgacaatgaaaatcgtcatcgactgtaactacattgttgacataaatatcatcaggtaacgttcggttcattgcatattgccattgtgacataggtatattcaaatctgtgtcgaaatgaaagtactgctgtatcgcatgtacacctctatcagtcctacttgaaggatggattctcacatgtcttttatgaatgcgttgtaatagcttttcaaattgttgctgtaccgttcgaccattttgttgaatttgaaaacctagaaaattatttccttgatacgcaatttctactaatatacgcatgaatttacactcctgaatattttaatacgaataaaataattgcaattgggataatcatgattaaagataacgtatctctcaattgccatttaagctgtctgtagctcgttctcttaacattggcatcataacccctaacttccattgcgaccgctaattcttcggcgcgttggaaagctgagatgaatagtggcactagtaatggaataaatgatttaatacgtgttgcaatgttccctgaacttatttcagaaccacgcgacttttgcgccaaaatgattttatctaactcatccattaacgtcgggatgaatcgtaacgcaatggacattatcatacttaattgatgaactggtaatttaaacatctttagtggcgcaagtaatctttcaaacgcatctgttaaatcaattggacttgtagatagtgtcattattgttgcaatcatcacaatcccaattaaacgcagtgatatatatagcccttctaaaataccattagtttcaatcgtgatgccatgccattcaactaatacatatccacctttagttaaaaatatatgcatcattaatgtgaagattaaaaagaaaaatattggcgttaaacctttgattaggaaccataattgaatttttgctaatctcataaagaataagataagtgcaaacatccaaagatatgttaatggtgaatgacagaaaaatattaatataataaaaagaaaaacaaacattaactttgctcttggatcaagatgatgaacaaaagaattaattggtaaatatcgccctataatcaatttatttttcatgttgccactccttatacaagcttacaaatgcttcttcagttaaggcaatatcttttaattttgtttgatgtttttgttcaaagtcatattgtaactgaacaatttcaggcaaaccaatatgccaatccgccaatttttctttatctttgaagagctcttttggtgatgtttgcgacacgatactaccttctttcattacgatgacttcatctgcataacgtgcgacttcattcatatcatgtgaaattaggataattgtcttattttcatctgtttgtagtgacttgagtaatcgcattacttgtcgtttactttgtggatcaagtcctgctgtaggttcatcaaccacgataatatcaggattcattgccaatatcgatacaatcgctattttacgcatttgtccacctgacatttgaaatggtgattgtgacattacatctcttgaaaagcctaaatccatcaacagacgatgggcatagtttttggcttcatctaaattcattttaaagtttttaggtccaaatatcatttcacgctctactgtgtcctcaaataattgagattcgggaaattgaaataccattccaattctttttcttacaggtctaatatatttatctttggtcttatgtgtaatagtaatatcatcaactgtaactgtcccagtagttggctttaacagtgcattaatattttgtatcaatgtcgatttaccactacccgtttgtccaacgatggcataatatttaccttgttcaaattctgtattaacatcatgaatagcttgatgctggtatggtgtccctttttgataggtataacttacattgtcaaagcgtataatcatagttgatccaccagcccttcataagttaagaatgatgtttggtgtcccagcatttgatttattttgattgggaatggcaaatctagacctattgttgttaactcttctgcatggtcgaaaatttcagtcgctgttccttctttatagacagtccctttattcataacgataacatgatctgcttccatcgcctcagataaatcatgcgtaatagaaatgattgtaatattatgttctgatttaacttttctcactaaatccaataaattttgacgtgcatcaggatctaacatagaagtcgcctcatctaatataatgacagaggggttaagtgctaatacacttgctatagccacacgctgcttctgtccccccgataatgcattaggttcataatctgcacgttctaacatatctacttgttcaagtgcttcgctgactcttctgtgcatttcgtcatgtggaaccgcatgattttcgagtccaaatgccacatcgtattttacaattgaaccaacaaattgattatccggattctgaaatacaattcctatgtcttttcttaacttttcaaaattatcatctgttatagcttgattattataaaaaatttctccagatttaactttctctatgccaatcattaacttggcaattgtagatttcccagaaccgttatgaccaacaatagatgtccactgacctttaggtatattaaaagaaacatctttcaatgtgaaggatgcatcactttgatattgaaatgaaacatttttaaatacaataactgaattcttatcctccacttgtctctctcctttacgattcgtgtatctatcatattttacaatatttataaatcgctgtatatgacattgactgggtttgctatatattactagtattttctgactcatttctagtctttaaagtgttgtttaacaactaatgataaggacatttattcctctctaacaattatgtataaacgttaataaaataaatgatttactagtgttggccgcgtttgattcaacgataatactttcacttcattcagttctagtgaaattgatcaaactagcttgatcatatttttagattcgcactcaaaaaagtagatataaagaaatcggacttaaaaacatttctgttcataagtccgatatcttattcaataaaaaagcgcgcaccccatcataagtttgttgagttcacgctttaaatctttatttagttgatggggtactctgagctagacaatatttgtatgtggcaaacattatcgttgcactcatttgctttatataaaagtagttagtgtatttatataaattcttatactaattcgataattactgattcagcaccgtcaccgcgacgagggccttgtttaaggatacgagtgtaaccaccttgacgttctgtgtaacgctctgcgatttcaccaaataatttttgaagtgcagtttgtgtagtttcatcttcgtttaagatttcaacattacgtaaagttttagctgcattacgacgagaagctaaatctccttttttacctaaagtgattaatttctcaacaacactgcgaacttcttttgcacgagcttctgtagtttcaatacgttcactaataataagtgatgtagctaagtcacgtaacatagctttacgttgatcagaagtacgacctaattttctgtaacccatgagttaacctcctttatcaatcttcttttcttaatcctaatcctaaatcttctaatttgtatttaacttcttctaaagatttacgacctaaattacgcactttcatcatgtcagcttcagatttgtcagctaactcttgaacagaattgattcctgcgcgttttaagcagttatatgaacgtacagataagtctaattcttcaatagacatttctaatactttttctttttgatcttcttctttttcaatcatgatttcagcgttttgcgcttcatcagtaagaccaacgaagatattcaagtgttcagtcattatttttgctgctaatgaaactgattcttgtggtgtgattgaaccattagtccaaacatccaatgttaatttatcaaaatcactgctttgacctacacgtgtattttcaacagtatagttcacacgttcaacaggtgaatacaatgaatcaacagggattacaccaattggtaaatcactagtattattttgttctgctaatgcgtaacctctacccttgttagcaactagacgaatttttaagtgaccacctttagatactgttgcaattttaagctctgggtttaaaatttcaacatcactgtcatgtgtaatgtcgcttgctgttacttcgccttcatcacgtacatcaatttctaaagttttatcttcttcagagtaaattttcaatgctaattgtttaatgttcataataattgtagaaacatcttcaactacattgtctactgctgagaattcatgtaaaactccctcaatttcaatgtacttaacggctgcacctggtaatgaagatagtaggatacgacgtaaggagtttcctagtgtagtaccgtagccacgttctagtggttcaacaacgaacttaccgaatttagcatcttcactaatttcaattgtctcaattctaggtttttcgatttctatcatttaaatatcctccttatatacgtcgacttaatttaaaatgtttgctcagtgacctgtaacaataccatcataaattatacacgacgacgttttggtggacgacaaccgttatgaggtactggagtaacgtctctgatcgcagttacttctaaacctgcagattgtaatgcacgaatagctgattcacgacctggaccaggtcctttaactgttacttcaactgtttttaaaccatgctccatagctgatttagatgcagtttcagaagccatttgtgctgcaaatggtgttgattttttagatcctttgaatcctaatgcaccagctgatgaccatgataaagcattaccgaactcatcagtgatagttacaatagtgttgttgaatgttgaacggatgtgtgctacaccattttcaatattctttttcactctacgtttacgagatacttgtttacgtgccatttaaaatttgcctcctttacctattattttttcttgttagctaccgttttaactggtcctttacgagtacgcgcgttgtttttcgttttttgaccacgaactggtaaaccacgacggtgacggataccacggtatgatgaaatttccattaaacgtttgatatttaagttagtttcacgacgtaagtcaccttcgactttataaccgtctacaacttcacggatgcgacctaattcgtcatcagttaaatctttcacacgagtatcagctgatacgttagcttcttcaagaattttttgagcagttgacgtaccgataccgtatatataagttaatgagataactacgcgtttttcacgtggaatatctactcctgcaatacgtgccatattaatttacacctctcttttattaaccttgtctttgtttgtgttttggattttcacaaattaccattactttacctttacgtttaatgactttacatttttcgcaaataggttttactgatggtcttactttcatttttatacctccctatattatggagtgacgattatttataacgataagtaattcttccgcgtgttaaatcgtacggagacatctcaacagttactttgtcgccaggtagaatacgaatgtaattcattctgattttaccacttacgtgagctaaaatctcatgaccattttctaattctactttaaacattgcgttcggtaaagtatctaatacagtaccttctaattcaattacatcttgtttagccattgattaacttccccctttttgcaatagtaaggtaatcgtcaatagacaactttattgttacgaatctatcagtgattaattttataagttaaacaaaaattacgggaattaattatcgttaattgccactctcatctatctaatatgattaaatcatgcctcacttaaaatagaccgctaaaagttgatctattacaaatgatctaaaatatcaatgacatctttggtaacgtcgctaatatcttttgaaccatcaatatttttcaatacacctttttgatcatagaaatctaaaataggtttagattgtttaatattaacactcaaacgattagctaccgtttcaggattatcatcttctcgttgatacaatttaccaccatcgatatcacaaataccttcgaccttcggaggattaaatacaagatgatacgttgtaccacatgactcacagattcgacgacctgtaagacggttcattaattcttcttccggaacttcgatattgatgacagcatcaatgtttctgtcaagctcagacataatattatttaatgcctcagcttgctcgattgttcttgggaagccatctaataaaaagcctttttttgcatcgtcttcagaaattctttccttaacgatacctacagtcacttcatcaggaactaattcgccacggtccatataagacttagcttctttacctaattcagtttcttcttttatagcttttctgaacatgtcaccagttgaaatgtggggtattgggaatttcttgacaatttcacttgcttgagttcctttacctgcgccaggtaaacccatcaaaatgatattcataagtgccctcctaaaattatctaccaccaaagcctttatattctttttgagatacttgtgcttctaaagatttcattgtttcaatcgctacaccaataacgataagtaaacttgtaccaccaatctgaattgattgtggtaatcccataaacttagttgctaatatcggtagaattgaaataacggctaagaagatagaacctacaaaagttaaacgatataaaactttagtaatatattttttggtttgttcaccaggtctaatacctggaacatagctaccttgtttcttaaggttatcagccattttttccggattaacttgtacaaatgcatagaagtatgtgaatagtataattagtacaatatatacaaccataccaacattacttgaaggatttgcagcattcgcaatgttttgtgcccattctttatctggatagaacaacgttaatgttctaggcagtaagaagaacgccattgcaaagattacaggaataacaccggctgagttcacttttaaaggtagataagttgcctgtgaacctaatctttgagcagtttgtttcttagcatattgaatcggaattttacgaacggcttcaagtacataaatagcacctacagttaatagtatcagtgacactaaaagtcctaatactttcaaccatgctaatgatgtatcttcttgcccaacgaacgcagtttgtccaaattgaattagactggctggcaacgttgataaaatacccgcaaatatgataatagaaataccattaccaacaccgaactgagtgatttgatcaccaagccatattaagaaagcagttcctgctgtcaaaactagtgctattaataaataactcataattgactgattgataatcagcgcacctttgagataattattaaattggaatgccatacctatagattggataaatgctaaagaaattgctaaataacgagtaacgttatttaactttcttctacctacttcaccttgttttgcccattctgagaatttagggacaatatccatttgtaataattgcattacgattgatgcagtgatgtagggtacaatacccattgcaaaaatagaaaatcgtttcaaggctccgccaccaaaagtatttaataactcagtggcaccttgagaaccttggggattatcaaaagctgcaggatttactcctggagctggtatataagtccctattttaaaaattactaacattgctagtgtgaagaaaatcttgttacgaacctcttttgttctaaagaagttcacaagggtttgaatcattagatcacctcgtgtgctccacctttagcatcaatagcttctgctgctgaagctgagaatttatgagctttcactgtcaatttcttatcaagtgaaccattacctagtattttgataccagatttttcattcttaacaacaccagattctactaataaagctggagttacttcagtaccatcttcaaatttattaagttggtctaagttaacaatagcatattctttacgatttatgttagtaaaaccacgttttggtaaacgacggaataatggtaattgaccaccttcgaatcctggtcttacaccaccgcctgaacgagctttttgacctttgtgtccgcgaccacttgttttaccgttacctgtcgcaacaccacgtccaacacgattgcgttctttacgtgaaccttctgccggttttaactcatgtaatttcatttcggcacctccttgattatttttcttctactgttactaagtgcttaactttgttgatttgcccacgaatagcagggttatcttcaacaactactgaactgttagtctttttaagacctaaagcttcaacagttttacgttgtgtttcaggacgaccaataacactacgagtgagggtaatttgtaatttagccataactagttttccctccttaattgtataattcttctactgttttgccacgtaatttcgcaacatcttcagcatttttaaggttttgtaaaccatcgattgtagcacgaaccatgttgattggtgtgtttgatcctaatgatttacttaagatatcagtgatacctgctaattcaagtacggcacgaacaggaccaccagcgataactcctgtaccaggtgcagccggtttcataaatacgcttcctgaaccgtaacggccagtaattgtgtgtggagttgtaccttcaacacgtggaacaactactaaatcttttttagctgcttcaacagcttttttgattgcttctggtacctcttgagctttaccagtaccgaaacctacacgaccatttttgtctccaactacaactaatgcagtgaaacggaaacgacgaccaccttttacaacttttgctacacggttgattgtaacaacgcgttcttcaaattctttcgtctcttcttctctacgagccatgtatttgtccctcctttaaattaaaattctaatccgctttctcttgctgcttcagctaatgctttaacacgtccgtgatataaatatcctccacggtcaaatacgatttctttaatgcctttgtcagcagcttttttagcaattgcttcaccgactttagttgctaattcaactttagttgctgtagtagcaatgtcgctgtcttttgaagaagcttgagctaatgttacgcctttattatcatcaataatttgagcgtagatatgcttgtttgaacgatatacgtttaaacgtggcttttcagctgtacctgataagttagtacgaacacgagcatgtctttttaaacgcactttatttttatcaattttactgatcatttcaatactcctttctttagagtttatctattatttaccagttttaccttctttacggcgaacgtattcaccttggtaacgaatacctttacctttgtaaggctctggaggtcttactgaacggatgttagatgctaatgctccaacttgttcttttgaaataccttcaactttaacgactgtgtttttctcaactgagaaagtaatgttttcttcagctttaatttctactgggtgagaataaccaacgttaaggattaagtctttaccttgcatttgagcacggtaacctacaccaacaagttcaagtacttttacgtatccttgagaaacaccttgtaccatattatttaataaagcacgagttgtaccatggtttgttctatcttctttagaatcagatggtcttacaacttcaattgtgttttcttcttgtttgaatgtcattctttcatttaaagttcttgataattcacctttaggacctttaacagttacatgatttccatcaaaagttactgttacgtcactagggatgtcaataattttcttaccaacacgactcatgttatggcacctccttattttttattaccaaacgtatgcgataatttctccgccaacattacgttttcttgcttctttgtcagtgattacaccttcagaagttgatactaatgcaatacctaaaccatttaatactttaggcatttcgctagcttttgcataaacacgtaaacctggttttgaaatacgttttaatcctgtgataacacgctcatcgttttgaccatattttaagaataaacgaagtacaccttgtttatcatcttctacgtattcaacatttttaatgaaaccttcactctttaagatttcagcaatttcttttttaatatttgatgcaggtaattctaacttctcgtgacgcaccatgtttgcgtttcttaaacgagtaagcatatctgcgattggatctgtcattgtcattgattgttgcctcctttcagactcttttttattaccagctagctttacgaacgccagggatttggcctttgtaagctaattcacggaaacaaatacggcataatttaaatttacgatatacagaatgtggacggccacaacgttcacaacgagtgtattcacgaactgcatatttttgttttttttgttgcttagcaaccattgaagttttagccacttaattagcctcctttaaataattatttacggaatggcataccgaagttagctaacaattcacgagcttcttcatcagtgttagcagtcgttacgataacaatatccattcctctaactttacttactttatcatagtcgatttctgggaaaattaattgttctttaacacctaaagtgtagttaccgcgtccgtcaaatgcttttttagaaacaccttggaagtcacgtacacgtggtaatgatactgaaattaatttgtctaagaattcatacattctttcaccgcgaagtgttactttcgcaccgattggcataccttcacgtaaacggaaagtcgcgattgattttttagctttagttactaatggtttttgaccagtgatcaattctaattcttcaacagcattgtctaatactttagaattttgtactgcgtcacctacacccatgttcacaacgattttatctatttttggtacttccattactgaactataattgaattttttcattaagttttcagtaacttcagtgttaaacttttcttttaaacggttcaaagtgggatcctcctttcaacttgttattaattattagatttaatttcttcgccagattttttagcgatacgaacttttttaccatcaacaaatttgtaacctacacgagttggttcgtttgttttagggtccaataattgtacattagaaacatggattgctgcctctgtttctaagattccaccttcaggatttaattgagttggtttttggtgttttttcataatgttaacaccttccacaacgacacggtcttttttaggtagagtagcgattactttaccttctttacctttgtctttacctgcgataactttaacgttgtcaccttttttgatatgcatgtgggcacctccttatttgtattggttgttattaattaaagtacttctggtgctaatgatacgattttcatgaagttaccttcacgtaattcacgagcaacaggtccgaagatacgagtaccacgtgggcctttgtcatcacggatgataacacatgcattttcatcaaatttgatatatgaaccgtcattacgacgaacacctgacttagtacgtacgattacagctttgacaacgtcaccttttttaacaacgccacctggtgttgcatttttaacagtacatacgataacatcgccgatgtttgctgttttacgaccagatccacctaatactttgattgtaagaacttcacgagcaccagagttgtctgctactttcaagcgtgtttcttgttggatcattagttaaacctcccttatctctaaacttgtattaaataattactgactcttcaacaatctctactaaacgaaaacgttttgttgctgataaaggacgagtttcttgaattttaacaatgtctcctaatttagctgaattgttttcatcatgagttttgtattttttagagtatttcactcgtttaccgtataatttgtgtgttttgtaagtttcaacaagtactgtaatagtcttgtccattttgtctgaaacaactttacctacataaactttacgatcgtttctttcgctcacttttgtaacctcctcttacttaattattgattagccttactttgttcaatttctctttcacgagcaacagtttttagacgtgcaatcgtttttcttactgtacgaatacgtgcagtttcttctaattgacctgtagctaactgaaagcgtaggttaaaaagctcttcttttgaagatttgatttgttcttcgatttctgaagtggttaagtctctaatttccttagctttcatttgtttcaccacccaattcctcacgttttacaaacttagtttttactggaagtttgtgacttgctaaacgtagtgcttcacgcgcaacttcttcagaaacgccagcaacttcgaataaaattctacctggtttaacaactgcgatccagccttcaaccgcacctttaccagcacccatacgtacttctaaaggttttttagtatatggtgtatgtgggaagattttaatccaaactttcccgccacgtttcatgtaacgtgtcattgctatacgagcagattcgatttgacgagatgtgatccaagacgttgttgtagcttgtaaaccaaactcaccaaatgttacgtagttaccgcctttagaacgaccagttgttttaggacgatgttgacgacgatattttacacgttttggtagtaacattattattttcctcctccactagtgttcttagtaggaagaacttctccacgatagatccatactttaacgcctaatttaccgtaagtagtgtcagcttcagcgtgtgcataatcgatgtcagcacgtaacgtatgaagtggaacagttccttctgaatattgttcagcacgagcgatgtcagctccgcctaaacgaccagatacttgagttttgataccttttgcaccaagtttcatagctctagtgattgcttgtttttgtacacgacggaatgaagcacggttttctaattgacgtgcgatgttttcagctactaaacgagcgtcaagatcaacttttttgatttcaattacgttgatgtgtacttttttatcagttaacgcatttaatttgttgcgtaatttttcgatttctgaaccgcctttaccaattaccataccaggtttaccagtatgaattgcaatgttgatacggtttgcagcacgttcaatctctacgtgagaaactgatgcttcttttaattcattatcaataaatttacggatttttaaatcttcgtgtaaaagtgaagcgaagtctttttcagcataccatttagcttcccaatcacggataataccaacacgaagtccgattggattaattttttgacccacagtattccctccttaaaagttaattaagcttctttagcttcttctttaccgtcacttacgacgattgtaatgtggcttgtacgtttgttaatcgcacttgcacgaccttgcgcacgtggacggaaacgttttaatgttggtccttcgttagcatatgcttctttaactactaattcatctgtgttcatgtcatagttatgttcagcattagctaaagcggacattaatactttttcaattactggtgatgaagctttgtttgttaattttaaaattgcaatagcttcagcagcatttttacctctgattaagtcaagaactagtcttactttacgaggtgcgattcttattgttctagcaaccgcttttgcttccattaggatgtcctcctctacttaatagatattatcttcttgttttcttgtcgtctgcaacgtgtcctttgaatgtacgagtaggagcaaactcacctaatttatgacctaccatatcttcagttacatatacaggtacgtgtttacgtccgtcgtatactgcaaaagtatgtccgatgaaattagggaaaattgtagaacgacgtgaccatgttttgattacttgtttcttttcgcttccttcttgagcttcaacttttttcattaaatgctcatcgacgaaaggtccttttttaatactacgagccatttgggcgcctcccttcttattatgtgcgtgcagctttaagccgcacacccaaataagttgattatattattttttcttacgtccacgaacgataagtttgtctgatgattttttaccacgacgagttttcttaccaagcgtaggtttaccccatggtgacattggagatggtctaccgataggagcacgaccttcaccaccaccgtgtgggtgatcgttagggttcattacagaaccacgaactgttggacgaatacctttccatcttgaacgtccggctttaccaacgttaactaattcgtgttgtaggttaccaacttgaccgattgtagcacggcaagtagataagatcatacgaacttcaccagatcttaatctgattaatacgtatttaccttctttaccaagtacttgagcacttgcaccagctgaacgagcgatttgtccacctttaccaggtttaagctcgatgttgtgtactactgtaccaactggaatgttttgtaatggtaatgcgttaccaactttgatgtcagcttcagcaccactttcaacgatttgacctacttctaatcctttaggagcaatgatatatcgtttttcaccgtctgcatatacaactaaagcgatgtttgctgagcggtttggatcatattgaatagaatcaacttttgcattgataccatctttgttacgtttgaaatcgataacacggtattgacgtttgtgtccaccaccatggtgtcttacagtcaatttaccttggttgttacgtcccgcttttttcggtagcggttttaataatgacttttcaggtgtagttttcgtgatttctgcgaaatctaacgaagtcatattacgacgaccatttgttattggcttatactttttaatagccattgtcgcttacctccttaatggtaattggtttattagttaaataagtcgattgatccttctttaagagttacaatcgcttttcttcttttgtttgtatagccttggtaacggcccatacgttttttcttaggtttgtaattcatgatattaacacttgcaacttttacgttgaagatttcttcaactgccattttcacttgtgttttgttaacacgagtatcaacgtcgaaagtgtatttgtcttcagccattgcttcagaagatttctcagtgattacggggcgcttaagaatatctcttgcttccattatccgagcacctcctcaacttttttagcagcagcttcagtaattactaagctgtcagcattagtgatatctaaaacatttaaaccttgagcagttgtcacttgaacgccagggatgttgcgtgctgataattcaacatttacatcttcgttttcagtaactactaatacttttttaggttgttctaatgtagataatacatttttgaattctttagtttttggagcttcgaagttgaatgcgtcaactacagttaagccattctcttgaactttgaaagataatgctgagcgtaaagctaaacgacgcattttcttaggcattttgtatgcataacttcttggagttggtccgaatacgataccaccgccacgccattgtggagcacggattgtaccttgacgagcacgacctgttcctttttgcttccatggtttacgtccgccaccgcttactgctgaacgattcttaacagcatgcgtaccttgacgtaatgaagcacgttgtaaattaatagcttcgaataaaacgctattatttggctcaataccgaatactgcatcgcttaattcgattgaacctgatttagttccgtctaattttaaaacatcataattagccattatgcatttcctcctttcacttcttattatttattaccttttttaattgaagttctgatttctactaaaccttttttaggtccaggtacattaccttttactaagataactttgttttctgtgtcaacttgaactacttctaagttttgaacagttacagtgtttccacccatacgtcctggcattttttggcctttgaatactctagaagcatctgaagccatacctacagaacctggtgctctgtggaaatgagaaccgtgtgacataggtccacgagattgtccgtggcgtttaattgcaccttggaaacctttaccttttgatacgcctgttacgtcaataacgtcgccagctacaaaagtatctactgagacttcttgacctacttcgtaagcatccacgtctacattgcggaattcacgaatgaagcgcttaggtgctgcgtcagcttttttagcgtgaccttcagctggtttattagcatatttgttagattttgcatcttttttgtatgcttttttgtcttcaaatccaacttggattgcgttgtatccatcaacttctacagttttcttttgtaatacaacattttctttagcttctactactgttacagggattaattcaccgttttctccgaatacttgtgtcatcccaatttttcttcctaagattcctttggtcatcgaaagtccacctcctaaaattgtctattataatttgatttcgatgtctacaccagatggtaagtttaagcccattaaagcgtcaactgtttttggtgttgggtttacaatatcgattaaacgtttatgtgtacgttgttcgaattgttcacgtgaatctttatacttatgcacggcacggatgattgtgtataccgatttctcagttggtaacggaattggtccagaaacatctgcaccagaacgtttcgctgtttctacaatcttctctgctgattgatcaatcacgcggtgatcataagcttttaatctgattctgattttttgttttgccataattttccctccttattcgtctacatttagtgatagacttctccacgaaaactatcttacacagcgccatggcaaagcggccgggtgtgtcagtaacctttcgcttcatcgcttttcttaaagtccaacgttagttatattacacgaaaagcatcgataaatcaaggcttttcacataatttttctatctgtctaacacatacttttatattttactttatatacttagtcagttcaactattttcgagatattttttatttccttctttattgtaaattcgtaccttgaatcattttattattatcattgaaaattattctatataattagtcataagaacggtggtgaatgaatatgaaaaatggaccaaaattatctttagcacttataggtatctttttaatactttgtgagtttttctatggcattccttttttaggtgcaacgtttattttaagttttggatggcagcctttactctttaatgcattactttatctaattcttactattatattattagtgaatagacaaaatgcaattagacctatagcgattattccaatatttggtatagtaggtagttttttagctattatccccttcttaggaattttgattcattggattttatttttcctaatgattctatttgtcctagttgtattatcagcgccaacctatatacctaataaaaatgctcgtgtcatttacacacaatacaaagatggacatagagaataattcttaaaacctttttaattaggtatatatattatagaagaaacacgttcaacaattttaaaagaagtatatttatatcggatatttaaagacattcataatattgctttatgttatttcgcttcttattttatccttacttcaaagaaaaaacgactaccaatcattggcagtcgttttttgtgtctggagttaaccatgaacaaatatgaagtacaaaatgaatagtaccattaatacatacattatcggatgtacttctttatgttttttagagataagcattgtaattggatagaaaataaatccacacgcaataccagttgcaattgaatatgataaaggcatcataatgattgtaatgaatgctggcactgcaacttcaaaacttttccagtttatttcagcaaagtttgcagccattaatacacctaccaccactaaagctggtgtcgtaactgcacttgttacaacagcgattaacggactaaagaatagcgctaataggaaacaacaacctgttacgatactagcaaatcctgttctagcacctacagcaacacctgaagttgattcgatataagaagttgttgtagttgttccaaaaactgatcctacaatcgtagctaaagaatctgagaacaatgctctaccagctcttggtaatttattatctttcataatacctgcttgagtagcaacggctactaatgtaccagctgtatcaaagaaatcaataaataagaacgttaaaataacaattaagaactgtatcgttaataattgacttgggtctttaaacgcttcaaatgcagcgccgaacgttggttcaatacttggaatcttacctacaataccagatggcatttgaatcaatccagtgaacataccaacgattgctgtgatgatcataccgataaagatagaacctggcaatttaattgcatataaaataactgtaataacgataccgaatatcgctaaaagtactggtggatcagttaaatgtcccaatgttactaatgtagattcatttttaactataatacccgaactttgtaaacctacaaatgtaatgaataaccctatacctgctgaaacagccatcttcatttgataaggaattgcattaataataacttccctaaaccctgtgacagttaatatcgcaaagaatatacctgagaataaaacacctgttaaaccaacttgccaaggaatacccatggttaacacaacagtaaatgcaaagaatgcatttaatcccatacctggtgctaacgcaattggatatttagctattagccccatgaatagcgagcctacaaatgctgctaatgcagtcgctacaaaaatggcaccttggtccattttcatatcttctgatacgcctttaacacctgctaaacttaaaacttgcgggttaactgctaaaatataggccatagataagaaagttgtgataccgcctaatatttctcttttaaagtttgttccatatttatcgaactggaaatagtttttcacgaatggatgctcctttttttaaaataccttaatagtttaatatcattcttaataaaaaacaataccaaaagcgaacttttcgattttatgattcaactttgttcgattttatctataaattcaagttttttaatgcatctttaaacggattattgtctaaaccttcatttttattcatatactttttcatttctttacgagatactttaccagaggatttagacttcatacgctgatccatatgtgcttgcgtttcagaatgtccacaaacacaacgatataccgcttcttttcctttaccaaacaacgttaatttctttttacagtttggacatcttgcatttgttttgcgctgtacattctttttcgtcttacaagatggatcttggcacacaagcatctgaccatttttagttttaactttaatcatgaatttaccacacgttgggcattcagtggttgttaaattatcgtgtttatatttacgatcactattttttatcccatttacaacatctttcgtaaaatctttcatttcattaatgaatgttttcgcctgatatttaccacgttcaattaaaagtaatttttcttcccattgtgcagttaaaagtggcgacgttaattcttctggtgctaattctaatatttgtttaccttttgacgtcactttaattttaccgtctcttgattcaatggcattcatattaaataatttatcgataatgtcggcccttgttgcaactgtgccgataccacctgtttgttttaatgtttgcgcatattttttatccttcaattgaataaagttctgagggttctccatcgcttttaataacgaaccttcattaaaatattctggaggtgttgtttcatgttctctaatgtttgtttttgaaatcttcacttcatcgccttctgaaaaaggctgttgcatctctgtaatagattcaccttgtctaatagatttaaagcctaatacagttgttacattctctttcaaaacaaatgtgtgccctgcaacctctaaagtaacagttatcgcgtcatactcgtgcggagacattaaagcttctaaaaaacgctcgacaatcatatcgtataactttaattctctattacttaagtctgacatgacaggtctcacttctgtaggaataattgcatggtgatcagatactttttgattattaaatatcgacatttttgatgaaaatgttttagacattaatgggcgcgcttggtctttatatgttgttgccatcgtcgcctgaatacgttctttcatagtatctaccatatcagttgttaaatagtttgaatctgttcttggataggttacgactttatgtctctcatataaactttgaagtgtattcaatgtttctttaggtccaattttataacgtctatacatatcttgttgtaaatctgttaaattgtacagtgattgcggatacgacttcttatgtttagtagcaacagatttaatcttaccatcgacatttttcaaattattaactatctgttctaaagtttctttattggtatatcgctgatttgattctagctgaaaatcaaacccttttaccgttaatgataatgtatagtattgttgtggtttgaactgattaatctcttgttgtcgtgtatttactaattgaatcgttggtgtctgaacacgtcccagggatagctgtgcatcatactttgttgttagtgcacgcgttgcattaatcccaacaatccaatccgcctcacttctcgctaacgctgcataatacaaatcgttatattggcgaccgtcttttaaatttttaaaaccttgttgaatagcttttttagtaactgagctaatccataatcgacggagtggctttttgttaccaactttatccaaaatcaatcttgcaactagttcaccttctcgtccagcatctgttgcaataataatatctttcactttattatctaaaattaacgcttttactgttttaaattgtttgcttgttttaccaataacaacagttttcatatatttaggtataattggaaggtcttctaatcgccattcctttaaatttttatcgtattgttcaggtgtcgcatttgtcactagatgacctaacgcccacgtgacaatatattggttattttcaaagtaaccattacgcttttgatttatttgtaaagcatcagcaatatctcttgcgactgatggtttttcagctaatattaaagatttcataaattatcctttctcatactttcttttatttcgaacgtgcttcatctattccactaatctttgatttaaattcaatgattgcaaatgatgtgttaaatgtattgtaacatgttaatatcactattaactttcatttcagttgaaatactatataataaaagtaacaaaaagtacggaggtaatgacatgagcatagttcagttatatgatattacacaaataaaatcgttcattgaacattcgaattatgaatcagcatcatacttatataaacttcctcaacagtacaatgaaatagatgtattaataaccgatgcgattgaatcacctggtgtattttcaattaaagaaaacgattcaattaaagcaatcatattgtcttttgcatacgataaaaataaattcaaagtcataggtcctttcgtggctgacaattatgtattatctgtcgaaacgtttgaaacgctgtttaaaacaatgacttcgaatcaacctgacgatgccgtctttaacttttcttttgaagaaggcattcaacaatacaaaccattaatgaaagttattcaagcaagttataacttcactgactattacatagaagcccgtacaagattagaagaagatatgcaccaaccaaatatcattccttatcacaaagggttttatcgtgctttcagcaaattacacacaactacatttaaatatcaggcccagtcaccacaagatatcattgatagtttagacgaccatcatcatttgtttttatttgttagcgaaggtttacttaaaggttatttataccttgaaattgattcacaacagtcaatcgccgagattaaatacttcagttctcatgtagattaccgtttgaaaggtatcgctttcgagttgcttgcgtatgcattgcaatatgcttttgataactttgatattagaaaagtttattttaaaattcgtaacaaaaataataaactcatcgaacgatttaatggtctaggtttccatatcaactatgagtacattaaattcaaattcgaatcacgtaacgtaaaagatcaaacaatccctgaataaaataccaagcaaataccccacagtacatcattagcatgtattgtgggtttttctactttttgtaaatattgaaaattataagtagttgttttttactattagggcagaatgctttacaataacatgcaagtgtcaattaaggggagcacttgcataaatagtataggagagtgagtagtcttgcaatttcttgatttcttaatcgcacttttacctgctttattctggggaagtgtcgttcttattaatgtgttcgtcggcggtggaccttacaaccaaattcgtggtacgacgctaggcgcactcattgttggattaggtttacttattactggtttcgcaaaattcaataatcctactgtaattattgtcggtcttatttctggtgcattatgggcgtttggacaagcgaatcagcttaaatctattagtttaatcggtgtatcaaatactatgccagtttctacaggtatgcaattagttggtacaacattattcagtgttatctttttaggtgaatggtcttcaatgactcaaattatctttggtttaatcgccatgatattattagttactggtgtagcacttacttcacttaaagctaaaaatgaacgtcaatcagataatcctgaatttaaaaaagcaatgggtattttaattgtatctacagttggatatgtaggtttcgttgtacttggtgacatctttggtgttggtggaactgatgcattgttcttccaatctgtcggtatggcaattggtggctttatcctatccatgaatcataaaacatcacttaaatcaacagcacttaatctattgccaggtgtgatttggggaattggtaacttgttcatgttctattctcaaccaaaagttggtgtagctacaagtttctcattatcacagttacttgttatcgtttcaacattaggcggtattttcattttaggcgaaagaaaagatcgtcgtcagatgactggtatttgggtaggtattataattatcgtgatagctgctataattctaggtaatttgaaatagaaagttaaatactcatgtaacgtaaaaatgttatcgtttctgaaaataaccattcacttttagaatgtttaaaattaattttcgtgaattttacgttgaatgttcctctatatgtcccaggaaatacatggctctaaaaacaaaacgcaataacacatcatgacattaatcatgcggtttaagactttaaaattagcgatacttttaaagtcttgatgatattcgtttatcaggtatgcgccatacatatgaagtggatagctgcataacgcactgcattatctgctagaatgtatgagttgaacaactatgtcataaataaaagcccccttttcacactatgcatttacatattgtggtaaagggggctctcattttctacgaatactaaaatggattttattttcaaatgtgtaaactagacaaacactgcctgatacacgtacaaaataatgatactaataatgattgttaaattggtcgtcatacctataaatggcagtgttcgatatttaaactgaataccataagaaataattgcgacaccaaccgggaacatccaagtgaccaacaatgtcgtcttaatcatatcatctgataccggtagcaacacatgtactaacaatcccgcaactaatgctaatccataatgtaaacataaatatttaatagtagcaggtatatactttctttccagagtaaaattcaacatgacacctagcaaaatcattgataacggcatatttgcatgggaaagtatgctaaagaaatcgattgccacatgtggtaaatggatgtgacttatattcaatataaacattacaatgtatgtaacgagtggcactgattgtaataatttcttacctaaatatttaaaatcgaattgatcactaccttcactaaagtagctacctacaaagtaagtaattccaaacatcacaaaggcaccacctatatcagccataccaaaataaataagtcccgttttaggccatatcacttcaattagtggatatgcaaacaatccaatattcatagcaccagtcatcatacctactgatccacgcatgtgattatcatattttctaaaaaaccagacagcaatcattttcgccacaataccatagataatcattaaaattggtaaaatggataatgacaattttaattctgcactgtttaaattcacaataactaaagatgggagtgtgacattaagaactaatgtagcaatgacttgactatctgttgcctttatataattaatgcgcttcaaaaagtaaccaagcgcaattaataaaataatcatagtaaattgttctgtcactgttatcccttctttcaataatcttcataatttataactttaacatactccacagatattttagaagtctactgtttcatgctataatctacattaaatgcacttaattatatttcaaaggagtgttatagtatgtctttagaaaaccaactagccgaacttaaatatgattatgttcgtcttcaaggtgacttagaaaaacgggaatctttgaatttagatacttccgctcttgttcgtcaacttaaagatattgaaaatgaaattagaaacgttcgtgctcaaatgcaagattaataatctatcattcagacaataaatgcttttcattacataaatttgactagcattgctctgaatacgttatattgatgaattgcttcatttttcgctcaattacatctagaatcacaagatgttgtcgtgttatgatttagtgtctcattaacaacatacgcgcatatctatcccaacactgctatttatgttttctacgctactgtactacatgaaccctttgaaacggagaggaagttatcatatgcaattttatctgattttactagcaatactttatctaattgttagttttattagtatttttaaaatggaagttgtatttactcgaattttgagaattattatgggtgtgttgttattattcgtcttagcattaacgacgatgagttttccaaaagagaattggtgggtatttatcgtcttattactcttagttggtaatgtcgaagtgacaggatttaaaatgcttaaaaaagatctaaaaggcgtaaacatcttgaatttaatgtcattatttatcttcgtcatatatttcatcttaaccatcgtactattctaagtaataaacaaaacatgcaataacataattgcaaccttatattatcatcagattacatatcgaatgccagtattgttttattaacacatcgattaaatcgcacgtgaaataaggtctaaaatttcaaattttaaaaagccataaaagtagtcaacatcatgaccgcttttatggcttttatattatctatcgtttagtgaatcgtttttttaaagtaaagagaatttcatatattactggtacaactacaagtgttaataaagttgatgaaattaaaccaccaataactgtagcggctaatcctttcgaaataagaatcgagctatcttgaccaaataacaaaggaactaatgcaccgattgttgcaatcgccgtcattaatatcggtctaattctagtaccgcctgcttcgattaatgcttctttcatctccatgccctgctgctcattattaatgacacggtctattaacacaatggcatttgttactacaattccaattaacattagcataccaattaaacttggtactgatattgtttctcctgtgattaatagtgcaataattacaccgataactgtaaatggtaaagagaataaaattgtaaatggtgctaagccacctttaaatgtaataactaggattaaatatacgataatgattgcagctaacattgcaaaggctaattgtgtcattgcattgttaatatcatctgatgcaccaccgatattaacctttacattattcggtttgtccaaattatttattttagacatcacttgtcgtgttgtgccacccacatctttatttgttactttagcagataccgtcgttgcataatcaccttgttcttgcgtcaatttacttggtgtcgttgttttaactaacgtagcgatatctcccaatttaatcgtaccaccagtcggctttttcaaagttatattattcaacttatcttctgaccagtctgtttgcttattttgtttgactttaacatcaacagttttaccattttctttaacagtcgtaactgttttttctggtaagttttcattcaagtgcattgcaagttgacttgcagaaataccattttctgccgctttattttgatcaactttaatttcatactgatcatatgtttgtgataaatcagatttgacattggctagacctttaacctgtttcattttctgttcaatatcttttacagttgattttatggcatccatagatggacctttcacagtaacctctacagatttattacctgcacctgttcctaaatcttgatttttccactctccaggatgtttaaagccatctgcatgtttaataaccttatccgcttctacatcaaaattaggcgtgtcattatcatattcaaccatgattgccatactatttgtactacccgttggatctactggactactaccgccaactgagtattgaattgtttttacatgctttttctgttttaaatatttttcaacatctttcgcatgattcaacactgcttgctccgtttcaccaggcttcggtgtataagtaatagctaaaaatttatcgtcacctgctgaaataaagctagtgcctagtctcggtcctccaaatacaatagttgtaaccaaaattaatgtacttaatataattacaatccacttatgatttagtgaccaatgcaatacttttttataagttgtactaacaacacctaatccttcttgatgttgtttattacgacgtttaacgccttttttaaatagtgttgctgccaacgctggaacgagtgtaattgacactaataacgatgctaataaactaaatgcaatagccaatgcaaaaggtctaaacatttctcctactgaacctgatacaaacacaagtggtaagaagacgataatagtaactagtgtcgatgacattattggtttaaatacttcagttgtcgcactgataattaaattttcaccttttagttgttcttctgaatctgttaagcgtcgataaatattttcaacaactacaatcgaatcgtctatcacacgtccaatcgctactgttaatgcacctaacgttagtatattcaatgaaacatcactcaatttcagagcaataagcgccataagaagtgataatggaatggatataatagaaattgccgtcgtacgaatgtttcttaaaaacagcaaaataactataattgccacgattgtacctaatgatgctttttcaaccatcgtataaagtgatttctcaacaggctttgcagtatccattgtttttgtgacattaaaatctttattttcatcaacgaatgtatcaattttacgctgtacatctttggctacttgaactgtattggcatcttgagctttagttatttgtagattaaccgcatccttgccattcgttttagaaatagaagtacgcacatcaccaactgtaatatcagctaaatctcctagtttcgctgtcggcataccacttatattatttgatgctgacgtttttgaattttgctgcggtgatgcctgattaacgtctgacatggctgaattttgtttattgtcactttgggattgagattgcccttgccctcctgccaacgttaatggaatatttatgtttttaaaagcatcaacagattgatattgaccatcaacaacaattgatttatctttatcaccaaattggaacaatccaagtggcgttgttcttgttgccgtttttagatagttttctacatcatcagcagtcaacccatatttttcaagttcattttgcttaaatttaagggtgatttcacggttcgtctgcccatttaattgcgcattttgcacaccatctaccgtttgtaattttggtattaattgttcattcagtactttcgttacttttttcaagtcattctctttatttgaaaatgaatatgctaaaaccggaaaagcgtccatcgaattacgtcttaattctggttgaccaacttcatctttaaatttaattttatcgatttcttttttaagctgttcttctgctttatccatatctgtattattttcatattcaactgttacaattgaagcattttgtatggattgcgttttaacatttttcacatatgccaacgatcttacttgattgtcaattttactacttatttcatcttgggtactttgtggcgttgcacccggcattgatgttgtaactgaaataactggattttgtacatttggtagtaattctaatttcaatttagcactcgcgtatacaccgcccaagacaactaaaacaaccattaaaaagatagcaaacttattccccaaagaaaattgtaatagcttttttatcacagtacttccccctctttcactatattcaaaaatattttactcaaccattctatattgtgtaaaaaaatctgaacgcaaatgacagtcttatgagcgttcagatttcagtcgttaatctattttcgttttaatttacgagatattttaattttagcttttgttaaacgcggtttaacttgctcaattaattggtacaatggctgattcaatacataatcaaattcaccaatcttttcacttaagtatgttccccacacttttttaaatgcccataatccataatgttctgagtctttatctggatcattatctgtaccaccgaaatcgtaagttgttgcaccatgttcacgtgcatacttcatcatcgtatactgcatatgatgatttggtaaaaaatctctaaattcattagaagacgcaccatataagtaatatgattttgagccagcaaacattaatagtgcaccagaaagataaataccttcaggatgttccttttctaaagcttctaggtctcgttttaaatcttcatttttagcaattttattttgcgcatcattaatcatattttgcgcttttttagcttgcttttcagatgtttccatcttctgctgccatttagcaatttcggcatgaagttcattcaattcttgatttactttcgctatattttcttttggatccaactttactaaaaatagttcagcatctccatcttcatgcaacgcatcataaatattttcaaagtaactaatatcacgcgttaagaagccatcgcgttccccagtgattttcattaattcagcaaatgtttttaaaccttctctatcagatcgttctactgtcgtacctcgttttaaagccaagcgcacttttgaacgatttcggcgttcgaagctatttaataactcatcatcatttttatcaattggtgtaatcatagtcatacgtggttggatgtagtcttttgataaaccttctttaaatcctttatgtttaaaaccaagcgctttcaaattttgcaaagcatctgtacctttatcaacttcaacatcaggatcgattttaattgcatacgctttctcagctttagcaatttcttttgcactgtctaacaatgcatttaacgcctctttattactataatcaacaacaaaaccacgtgaaatataacatagcgtataaggtaatttaggtacttttttaaaaagtaactgcgcaacaccctgaatttcaccgtcacgacctacagcgattcttcgcgcgtaccatccagttaatttttttgtttctgcccatttcgttaattgtaataaatctccatttgggttagatttaacaaatgcgtcatgttcctgattagtgatatgcatcttttccatgatttatgatatctccttctatttaacaatacctttaattatacagtttgtatcttatagtgtcgattcagagcttgtgtaagatttgaactcttatttttgaaatgtccatgctccaattaatagtttagcaagttcaaatttactcattttaattgtgaatcattttatatctatgcttcctgttaaatttaatgttatcgtacaattaatacttttcaactagttacctatacttcaatatactttcatcatctaacacgatattcatttctaacatgaaccaatttgacttcaatgaataaatttctcctcaagcaaccacattaatgttcatatacaattacccctgttataatgtcaataatctaacaatgaggtgtttgatatgagaacaattattttaagtctatttataattatgaacatcgttgcaatcattatgacattgagtcaacctctcaccgtgaattactttagtttacgggttatacttatctttttcacatttatattatcaatctttttcattttaattaagtcatcacgattaaataatatattaacgattctttccattgcgcttgccattattcatatgggcattctcgctcatagcacttacgtatatttatactaatggttcaaagcgataaatagcacctctgataaaaattgaatatggtgaagttgcttgtgcgtcttttattataaccgaatgatattttgaaactttaccatcttcaattctaaaataaatatcatcattttttaaaatcaaatctgtgtaatggtcgttctcttctacaatgtccatatcaaaccatttcaaccaattcgatactgtttgtgatcggtttttacttttcacaataacagtttcaattgaaaattgtttttgaaaatatttttgtaattttttagtacgcatggaatcactttcttcccattgaataaaaaatggtggcttaatttcatcatcatcctgattcattatataaagcaattgccactttaccttaccatctttatgtgtatctctttccatttgaatcggtcctactacttcaacctgctcactttgtagtttatttttaactgcctctatatcatttgtacgcaaacaaatatttttaaagccttgctcatacttctcttgaacaatttgagtagcaaaagcgactccaccttctatcgtttttgccatctttttcaacttttcattattttctacatctagtagctcaatataattttcattgatataacctaatttattgaatgttccatatttatgatgatacccacctgaatgtaattttataacatctcctggaaaactaaaccgatctaactgatctatataatgaatgatgtgatcaaatttcaatatcattagtatccccctatttacatgtaattacgcttattttaacaaagtataaatatttttgctcttaataattatatattgatttctaattgtccccgttttataattactattgttgtaaaaaaggttagctaagctaactattttgtcttaggagatgtcgctatgctatcacaagaatttttcaatagttttataacaatatatcgcccgtatttaaaattaacagagcctattttggaaaaacacaatatatattatggtcaatggttaatcttacgcgatatcgctaaacatcaacccactactctcattgaaatttcacatagacgtgcaattgaaaagcctactgcaagaaaaactttaaaagctctaatagaaaatgaccttataacagtagaaaacagtttagaggataaacgacaaaagtttttaactttaacacctaaagggcatgaattatatgagattgtttgtcttgatgtacaaaagctccaacaagcagtagttgccaaaacaaacatttcacaagatcaaatgcaagaaaccataaatgtgatgaatcaaattcatgagatattattaaaggaggcacacaatgactaatcaaggctcattaaataaatcacctattttcaccaaaagttttacaattaacttttttgtcaattttatcgtatacctatgcatgtatttgttacttgtagttattgctggctatagtaagcaagctttcgacgcttccgattcattagccggattagttgtaggactatttattgtcggttctttaattggtcgatttgctacaggtaaatttgtaaatcaaatcggacctaaacgattattatttattggtttaattgctttaattatcacgcaattactttattttattgatggatctttagcttttttaatctttgtacgtctcataaacggtatcgcaactgcagttgtgacaactgcaacaggtactattgcggcatacgttacccctgttaatagaaaaagtgaaggcatcagtttattttctttaagtttagtattaggtacagcgattggcccatttctaggcatgttacttattacaaaatacgcaattgatttactgtttattatttgtgttatattaggcatactcggagtcattatctcattatttataaaagttgatttcgaagtaacaaatagcaaaactgaaactaatgtcattgataaaccaagatttagtattcatcaatttattgcaaaagaggccattcctgttgctgttattatgcttttaattggcgttacctatgcgtccatcctaacttatttacaagcatttgctatagagcgacacctagtaactgcagcaagctatttctttatttgctatgctatagcatcgttaattactagacctattgctggtagattgatggatgataaaaatgaaaatattattgtctacccagcatttatcatgcttttcctttcatttgtgtgcttaatttcaagctatcaaagctggttaatattacttgctggtgcttgcctaggtttagggtatggaaatttatcatctgcaatgcaatctattgcgataaaagtctcacccccgattaaatatggtatcgcgacatctactttttacgttggtctagatgcaggtgtcggcttcggtccatcattccttgggttatttactcatatgttttcatatagtgaaatcttcggttttatggccgctttagcaatcattactatgcttgtttacttcttaattcatggacgtcatgtaactagaaatgccatgaactaaatatttatattcaaaaataaaaagcatgccaatctctattcatcatttgtctgtccccaagacgcaattatgatgtactgattggcatgctttttaagtttttagtttgtaacgcttaacacttctatttctttagtaattttatctaacaatttcttttgagaagtactatagaaatagaatacttgtctttcatccgtttcagaacgcaatttagaaataagctcttttttatagattttacggataatcacatcgattttacttgtatcccatagcatttcaaaatgtaatgtatccctcaattctttaccgctaatcttttcagcttcatacactttaaaaagtactacaaattcttcaattgaaatcttatgtgttgtttttaaccagtgctttaactgacttaactccctttctgcttctataaaacgttgaactttattactcataatatgatgcctcctatgtttcttcttagatgtttgtaattcatattattatacaattacttaaatttattatatatcaaacttagcattttatctattacaaatattaaattgctggctatatcttgtttagatttatatcttttggacaacttgttgtttattcgacaacatttatacctaaaaaagatatattacaactcaatgacttggagtgtgacaacaatgttaaagagccactaaagatttattatgtagtgattcttaagagtgggatagaaatgatattttcataaaatttatttcgttgttccccaacttgcattgtctgtagaatttctttttgaaattctctatgttggggccccgccaacttgcattgtctgtagaatttctttttggaattctctatgttggggccccgttccccaacttgcacattattgtaagctgacttttcgtcaccttctatgttggggccccgccaacttgcacattattgtaagctgacttttcgtcaccttctatgttggggccccgccaatttgtaaaaatatttaaaacgatcatttctattaaatttggcatagatatgaccgtttttactttaataaataatattgtattttagggagtaagacagaaatattaaagaatctctaatgatttaatatgtagtggttcctacacattaaccaccaatataattcatgtttatctttttacgttgacgattggcaactgtttgagcagttctctcatctgaatatcgatcatctcttatttgccataaagctttaaattgttcttttaattcttcgtcggtcacgccagaacgaataaacgctttaacgttaaatccatcggcagttgcaaataaacatccgtaaaacttcccatctgatgacagccttgcccgtgtacatgtagaacaaaatgattgtgaaacacttgtaatcaaaccaaattgaacaccattatccttatgtcgataatattttgctacttccccaaaatattttggttctacaggatcaatttcaaagtgctgctctatcatagtaagcatttcatctttagttacaactttgctgaaatcccatccattatcattaccaacatccataaattctataaatcgaatctctatatgtttatctttaaaatattcaagcattggtataatttgatcatcgttaatacctttttgtataacaacatttacttttacattcaaaccaatagacgtcgcgtaatcaatttgttctaaaatcgtagtcgctttaatattacgattattgattgattgaaatagcgtatcatcaatagcatccaaactgacattaattctgcgtagcccagcatcatataacttttgtccatgcttttttaataacaaaccatttgtagtcaaaccaatatcttcaataccatcgatttgatttaatttagcaataagtacatctaaatcccgtcgcatcaatggttctccacctgtaatgcgtattttttttacacctaattctgcatataccttagcgattctagccatttcatcaaacgttaacagttcatttttaggtaaaaatacgaaatcatctccaaatacctctttaggcatgcaataatcacacctaaagttacaccgatctgtcacagataaccgtaagtcacggatgggacgtcctagtttatcttttatttgttctaccatttgtggacctcctaacggcttacaatttttgaattaaagcgtccaaatcatgctgataatttatatttttgtaccaatatgagggcgcatctacatccctgacatccaaataatcagttgataattcatgatatacatttttaaaactgtaattatcagaatgtagtgctttagttatagcgcctaatgcattcggactataaaatgcaattgttggaataaaacgtccatcttctttaaaagctgcgacatctaaatgattttcaataagatgagaaactaaaaactgatacaacgtgcttacagctttaccagtaatcattggtgtatcaacagaaacgacaaaaaacaattcttcttcaggatgttgcttcatgattgtataaattcctgctaatggacctttatcattatgattctcatcatctataacaacatttggatatttaaattgcgttgccaattgcgcatttgtactaataataatttcattgaacatatttgttgattctaatgccttaattactctactataaaaggtctcaccgttcacttccgcaaaagctttgggcttaccaaatcttactgaatgaccacctgcaagaattattgctttcatgctcgcttaacctccactaaccggtggaattaatgcaacggtatcattaggttgaatgaaatcggatttttgtacaaattcctcatttacagcaacttgaaactttttattattgatttgcggataacgttcaaacaataaattttcaaattgttgtacagtcaatgcttgttcaagcacaatatcttcctgtgctttttgtaatatatctttaatttctgcgaagtaaagtaccttcatctctcttattcctccctcttcgcttcttcataattccctttttgatgtccttgccattttgaaccatcttcccaaatttcttttttccaaatcggaacaatttctttgatacgctcaattgcatattcatttgctcgataggcatctttacgatgcggtgaagaaactgcaattaatacagcgatatctgaaatttgtaatggccctattctatgaacaatactcgttatcgttccaggccatttttcatttatttcatctccaatttgtgccaatttcttttcagccattggaatatacgcttcatattctaaatattccgttttgacgcctttagtccattcgcgaacatgaccggtaaaaacaactactgcaccttgatattcatttatagtgaattcacgatattgttctgtttgtatcggttctgtcacgatttcaaattgtttcattcatttcaatcctctatgttaattgtgtatcacaatcatttttaattttatttaataaccattgctcaaatgctgtaaaatcttcatgctcccttacattaatgctataacaaacattcatcaattgttgtaatacttgcaactcttcttcatttcgatagactacgactttttcaaaatcagcatttttaaagccttcaactaatacgatattggtgtcaattgtaacagatttctcaataatttgagtaagattttgattatctacacgtgttacagtttgctgatattgaaatccttgtacaatactttgatctgcccccgcttcaaaatgcttcatgtgatcgacgtctgaatcctgtaattgaatatcttccttaccatgcccatgatgtttaatagtagcaactgtataaccatgtgactttaagaaagagacaatatgcctcatcaatgttgtcttaccagactttttgtaacctacaatttgtaaaatcataaaagaagttcctcttcagcagcgtcagattcagtcaatataatatctactgtatgacccgctttaaaaccacgtgaccctcctggtaacatgaccatacagttagcatgtgcaatcgctacaactgcacctgatttattgaatcctgaaggtactacagtagctccagcacttgttaacgttgctttagcacgtataaatcgtgtgaatgggtttgccttggtaaaatcttccattaatgttgctttaattatttgcgggaagacttctagtgcgccacacatatgtttaacagctggtttcacaaatagttcaaatcctgtaaaacaagctgatggatttccagataatccaaacaaatactttccatctgcaaatgcaaccgttgtaacgctaccaggacgcattgctactttattaaataacacttccgcctttacagccttataaatctcaggtaaatagtcaaagtctccaacagaaactccgcccgttgtaataacgatatcgtgtttttccatagcttctttaacgacttgtataccactatctaaatcatcttgttgtgttttgtaaataccaacttcaagacctaatttttctgctaaggcacgaatcattggaccattagagttacgaatttttccatcttctaatacatcattaacatctaataattcgcttcctgttgcaataacagcgacgctcggttgcttaataactttaacctctgcatagccatatgttgcaaggaccgcaatagcccctggattaattacttgttctttttttagaacaacatcgcctgtcgttgtttcttcaccttttaaagatatattttcattttttgaaaatggtttacgaattgtaaatgtatcttctagttcaatcgtttgttcaaacataacaacagcatctgcgccattaggtatttgtgctccagtcataatacgcaccgcttcgtgatccccaactaatttatcagaaactgaacctgcaccaatatgatcaatcactttaaactcaattcgattctgaccacttgccccttgtgaatcaacactgcgaattgcaaaaccatcataaggtgatttatcaaatcttggtatatcataagtagctacaatatcttctgctaaaatatgatttagacttttttcaagtgctaccgtaattgccggcattgtactctgctgattaacgatacgttgaattgcttctttaactgggattgggtttcttttttctactaccattaaaaatcatctccaaaacttttattttttcatgatatactagatgcactaggaggggtaaaatgactgagtttactcatattaatcaacaaggccacgccaaaatggtcgatgtatcagacaaacaaattacaaaaagaactgctgtcgctcattcaagcattactgtaaatgaaactatttataagcagatttctaataacaccaataccaaaggcaatgtattgaacactgctcaaatcgctggtattatggctgccaaaaatacatcaacaattattccgatgtgtcatccattaccattgactggcatagatgttcacttcaactgggatgaaacaaatgcacccctttatactttaaacattcaaacaactgtctctacaactggcaaaaccggtgttgaaatggaagctttaaccgctgcatcagcaacggctttaaccatttacgacatgacgaaagcagttgataaaggtatgattattggcgaaacctaccttgaaagcaagtctggcggtaaatctggagattttcaacgccaattagatcaataaattattttgtaagctcatgaatcagatgatttaattctggtttaatgagcttttctaatgctaatttaactgcacctgttgatcctggaattgaaaatatcaatttatcatttactgtacctgccactgcgcgagataataatgcacgcgtgccaacatcttcaacataactcaaatatctaaataattctccaaagccttctatctctttagttaaaagtggttttactgcttcaattgttacatcacgttgtgcaatacccgttccaccagtcgtaatgatgacatcaacatcttcttctaaccacttcttcacctgcgtcgtaatagctactttttcgtcttttacaatggtataatgtgcatcgctaacttcaacattatctacttgtaacagttggagcacgcattgaccacctttatctgtatcaaagtttctagtatctgataccgttagtacggctgctttaactgtacgattcaatttaacgttttgatgttcgcccataatattacactccttttgttttacctttttatccaaacaataaattcattagatgtgtggcatctgatgtgcgtgtcatgccatgtattaaaaaccttccacctttaaaagcaacaatgcggtgccctttaaattcaaacataaccatatatgaattactgcgataatttagttgatgctgttttaaaaattgaacaagaatatcgtgtgtaattgatgtattttcatactgtacagtgtctctcccacacaatgttgcataacgttgttcattcttgtttaaatacggataacttggtacatctccacaagttgtacaggctgtacgttgcattttactgaaaccaaatgaataatgactaccttcccaaatatcgccataagttatttttgtgtcaattggttgttccgttaatactttcatcgcatctcttaattgtaaacttgttgccatcgtcacggcaggttgaatgacccctactgtatcacatgttaaatttaatgctggcaattgtggtaccaaacagttaaagcaaggtgttttaccaggtataaatgcagcttctgtatatgtactctgtacaacacctccataaatccaaggtatacgatgtttatatgcaaaatcattaatcagttgtcgtgtttcaaagttatcggttgcatcaatgataacgtcaacgtcctgtccatgtgtctccaaaaaataataatccacatggtcaatataatcatcaatatcaacatcactacgtaacgctagcaaatgctttttagctgcaaccactttaggcatcattttcaaagcatcttcttcagtaaataatgtttgtctttgtaaattactaaattcaatataatctctgtcaacaatgattagtttagcaatgcctgctctcacaagaccttcagccacatgtgtacccaatgcgcccataccaataatcaacgcgcatttttgatttattttgttttgacctatttcacctatttgtttaaataaaatttgccttgaataacgttcttgactcacattaagttatcctttctatttatccttactttcattatatgacgtgcgtcaatgtctctcaaaaattgcgcctaaaaaagagtttaaaacatcattaaaatgctaatagaagattgcacttctacatttttaaatacgttctaaactctttcaaggcaaatgtatcattaaccaattgtaataatttcatgagccatttgttctgcttcatagtttgaatgtgtcacaaatatgattggtatttgccattcgttgaaaatacgtttaactaatgtaatactctcatcttttgtagtatcatccaaactagaaaaaggttcatctaataaaattaaatctggtttcgtgctaagtgcacgtgcaagtgctacacgttgtgcctctccacctgacaatgtcataggatattgtttcatcaaatgatcaatatttaaagtttggattaattgatcgatgtgttcagatggttcagccataaaagtaatatttttatagaccgtcatattaggaaacagttggtagtcttgaaataaatatccaatacgtcgttgttgaattttaacattcacgttttttgccgtatcagtaagcaattgcccattcacttcgataatagcttcatctgctttacgtaatccggcaatcatatttaaaacagtagttttaccaatgccagatggaccacgaactgcataaatttttggttcagtatcatctatattgatgcgaattaaagtattctttaattgatattttaaattgattttaagcatctagtcgacctccttatatttatctttattcaataaattaattgtagatataaccacaatagagaatgcgactagcactaatacccataaccacgcttcattttctctaccttgttccactaagaagtatatttctaaaggtagtgtattcgttttatttggaatatatcctgcaaccattaatgtagcaccaaactcacctaatgcacgagcaaaactcatcattatacctgctaaaatagagcgtttagctaatggtaaaattaatttgaggaaaattttcgtttcacttgctcccatcgttctagctgtattaatcattttcgtgtctatacctctgaagccttgcacagtatgttgatacattagtggaaaactaacaatgacagatgctatcacagcacctgtcaaagtgaatactacaggtaaatgtagtacattcgcaaagaattgaccaattggtcctcttggcgagaagatgattaatagaataaaacctaataccgttggcggcaaaacaataggtaatatcaataaactttccaatactttaacccacgaacccttacgacgatacaaccatttagatataaaaatacctaaaatcgttacaataatcgtactgattacagcaactcgtattgatatccaaaaaggtgttaagtcaggcatggattacaactccttatgctgtaaagtggtattcttttaatatttctttagctttatctgattttaagaattccatccactctttagctaatttactatctgatgtcgcaccagcttcatatgtgattggtttcttaagttctacttctttaattacttttacagtatcaatttttttattttgtttatataagtcagttttatatacaaaaccttgtttcgcattacctttttcaacataatttaatacttgttttacatctttagcataaacgattttactttcaacttctttaaacaagttattgttatctaaatactgtttcgcatattttcctgctggtacagttttcacttcacctaatgctaatttatcattgccttttaagtcttttactgaagtgtaatttgaatctttatcaccaattaatactagactatttttcgcatatttatatgtatcatgtgctttattcttgtcttttaatgcatctacatctttagtatttgcagacataaatacgtcaacaggtgcgcctgattcaatttgttttcttaatgctcctgatccaccatagttaaatttaatatcagcatttttatgttcttttttaaattctgatgctaatttttttgtaacatctgttaaacttgctgccgctgcaacttgaatttcttgtttttttccattgtctgctgcatcttttttgttgtcttgattatcattagaattagaacaaccagctaatactaaaaataatgccattacaatagctataaaacgtttcattttcattatgaaatacccccaattattaaatatttacactctcattatacacttaacaatatttttgaaaagaagcgttttctctttaaataatgattcaaataattgtcacactttctaaaaattattttttattaattgagctgctagtgtgcctttttctaaatccaatcaaattctaaataattgcctgctattttatttagttaatcaaatttcagttttaagcaaatatgttaaaatattaagcatattgatttaaaataaagttcaagctaattaaaggggttagataatgaacaaagatgtatctttaggtcaaccaattgttagatatgaagatggaaaattattcaatacaacagatcaatatgtgacagaatttccacttacaattatggtgaatggtgaagaatttgcgactgttatatgcagtccaacaaaccttgaggagttagtcattggatttctggcttcggaaggtgccattttaaagcgagatgaattaaaatctgtactgattgatgatagtaaaggatttgcccatgttgaactgaataaagatttaggcgatcgctttcaatattccacaaaacgaatgattgcatcttgttgtggaaagagtcgtgagttttattttcaaaatgatgctgctgttgctaaaacatctatgtctaaaatcactttaacaccacaacaaattattaatatgatgacgcgtttacaaagtgccagtcatatttaccaagaaacaggtggcctgcataatgctgctataagcgatggtttgacattttttgtacatcgacaagacattggcagacataacgctctagataaattatatggattttgtattcagcgacatattactgtccgagataaagtattaattttcagtggacgtatttcatcagaaattttaattaaagccgcgaaaattggtgttggcgtcattttatctaaatctgctccgacaacgcttgctgtaaccttagctaatgacctaaatattacggcagttggatttattcgaaatggtggctttaatatatacagtcatccagaacgtatcattgattctgaacaataacatattcattatagtatgtcataatgaacgtattctacatgaatcaacaatataaaagcactatttttataagtataagtagctcaaaacaatttaaaaagcagtaagttgatttctactcgaaaccagtttactgcttttttattctaatacaaacctatcatcaatcgttaatttccaatatcttcttttaatatttgataacaaaatgattggtaaacataaccttgctttgcatacatatcttttgctgtatcttcgccatctgcaactaatataaccggtttatgatttctagataaagcatattcacctactaatgactgcatggtagaaccgattccttggtgtcgaaattgttctagtacaccaaatccatctaattcaatgtaattttcactttcaatgacatctacaacgccaataggttcattatttaaataagctactaagcgtttaatcacatctttttgataatgttcccttaccattttttcatgtgcatctgcatagtctcttccaaatggcaaactaaactgatatgcaacttttaaataggcatctatatgcgactcgtcaacgatagcaatttcaacgtcagagttacgcggcaaattagcaagcgcatcactttctatggcatacaattccataatacctagttcaaaattcatatctttaaaaatagccatccaagtgtcatcaagttgttcattttccggaaaactaaatgcataatgatttgaaccttgatttgtatgtaattgatgttgacgctttaagtctttcaaccattgctcttgggtaggcatctttttatataaccatgtgttgcttgtgtatcgttgtggaaaaataggcgttaaataaatcaactgcttgtcgttattttcaaatattgtaccgtcgcaattaatatctgacatacttatatgagacattggcacctactcctttcactttcaacaattgaaaagcaacttaatcaattacttttttatcttaaatatgattactttaatcccataatttgacgaaactgcgagtgattaagtaaagctgtaccaatcaaacttgctacaattgcttttaatatatcaccaggcaaataagctaatgaaattgaaatagctttcgtaaatggtatgttaataatcatgcccataatcaatgtaccaataacatctaatgctataacaccaaaaactaaaataccaacgaataaaatccagaaattaatttcattgatgaatctatcacgaatcgcaccaatcatgaatgctacaactggatataatagtaaaaaccctgttgaaggacctgcgaatacaccaatgccaccgcgaccacctgataacagtggcaaaccagcaactactaataataaaaagacgataacacttaatgtgccatatttacgtcctaaaatcacacctgctaagaaaataccaatgttttgaagtacaattggtactgaagaaaatggtagtggaattaccggtaccaatcctaaaatagcgataatcgctgtcattaaagctgtgtatactaactgttttgttgtcattttttacttcctttcgtatttcatgaccattattatagcaccattgtaaactttaaggaacgaaaagtttacaataagttgttctatataaattaaaaccttaattattctacacagctgttaatttacttttttagcaagtgcagttatataatcaaaaaatgcgttgttatctacatgatttatgacattaattttgcgcccatctttacactcaaatgtcttaccttgacttggtccataacttattacatccacttttttctcaattgagtgaactaagtccttgttaccaatataagcagtcgttaaaacatcccataaaaagtaagtagaatttgttataaagtgtgttaatggtggtaccgctgcataacttactcctaaaaaatcaatgcccgtatattggcgttcattcgcccatctttgtctaacatctaacgttagcggtacttgattcgtactttctaaagcaaccatatcaatctctatatcgctatcaaaaacaattttaaccgcttctggatcccaatatgcattccattctgcagaaccatcatgctcaggttcttcaacatttccttttggtaaaaaggtaccacccatccaaactaatttttctatatactgaacgattgatgaatctttttgtagtgcttttgctaaatctgtaagcgggcctgtaaataataatgttactttttctgattgtctctttaaagtttgaataatgtcttcaaaggcttctttgtctctcacatttgaagcaacgtgtttgactggctcatttaaaattggcaatgcgtccataaaaaaggcatgcatacgccattctttaggaaatggattttttcctcgttcatatgatggcgcaacttgaatatcttcctttgaaaaacgattaataatttttactgatgcactcaaagatggctctaaataacaatcagcaccaattgtactgacccctatcaattgaacgttttccatttgtaataataaaaatagagatactaaatcatctacaccaccatcatggttaaaataaactttcttagtcactcgaaatcccccttacatttcattttccattaacaatattatgtttttataaaacgttgtaatatatctttctacaaaatcataacattctgttgtaatccttttaaacctcttctttaattgataggcattccctgatatgccttccataaagtatgcactaaaataattatgatataacttattaatgcagagatacattgagctattttctcaggtatactactttagctgtaataatactaatctatcattaattaaattgaatgataataacggcacttattatttaaaaaaatacaaaaatctaaccttcttgctataaaaataagagcctaatacaatatcaaaagattgatatgtttcagactctcatttcactggcttatatagctgaattattttgcagctttaattaatttttcttttaaatctttacgcatgaaatctaatgtataaggatcgttgtaccagtatgtaccagcatcaactttaacaatatgtccttctttagtagctttcaaattcttccacatgtttgttgattcgtatcctggtgtaggtttaccttcacttgtactcacaatgtaatcaccagcatatttttcaatttcttcttgtttcacttcagcccaacctgcttttgcagttaacttttgttgttctggttgcatttttaaaccaaatgcttgatataatacttctccaccacgaccccagttatcgccgtaagtgtataattttttatcaaattcatcaaacaatgacactgttgcatcttgtccaattgcttttttaatttctttaccgtctttagcagttgtttcttcccaatctttcttccaagcttttactttatcttctttaccaacaattttccctaacatttcttgttgttctaagtatttatgcttattatagtcaacaactactgttggtgctactttttgatactttttaatgtctttgtcagtagagtatacaataattaaatctggcttttctttagcaactttttctatatcaccatcaccaattttagtaacacctttaaatttatcttttaacactttgctttgatcaacttgttgatttacagctacaatgtttgcacctaattttttaagtccaccagcatatgttggcgcaactactgcaatgcgtttagggtctttcggaatatctaccgttttgccatcgtccattttataagatttagtttcagctttgttattttttttcaccttggttcccacacgcagctaacactaataacataattattaatggtaataatagttttttcataatttcctcctattgaaaatgattatcaattattccaaaattatacaagattgcatatacatttacaatagctagtgttatttatttttttattttcgcaaaaaatttagcaaaatatcttaatatacctataaattcccgcaaaaaaggtaaatccgaacgtcaaatttcatctctttatgccaatcaacgatcgatttacctttttaaatttaaaatgtatctgtaatactcttagcaatatttgtatatgctgcatcttccataggtggattgtgtaatcctgcacgcatgtcacgatagtaacgttgtaatggccgattcatttctaaacttttagcaccaacaatgcgcatcgctaaatcaatcacttcaaggccttggttcattaccattactttactcgcactcgtcgcatttctaatctgactttcggctgtatattgttgatagcctttcgctgtactccataaaaattgtctcgcacataacaacagcgtttccatttttcctaaattttgttgcacagttggcaatgttgcaatcgttccttctatactattagggctatgttggattgcaaagtctacagcataatttctagcagcttgtgctatacctaaataacagcttggtatatgcaatatccaaccatttgacgctttacttttctctgtttccactaaatgttttaatggtacttttacatcatttaatattaaatcacgactttctgtcgctcgcatacctaatacgtcccaattatcggcaatttcaacaccaggcaaattcctgtccactaagaaaaaaccaacactttttaattcttctatataagcagcaacaataatatgtgttagtgctttactcattgatgtatatgtcttcacaccatttaaaatatacccatcatcagctttaacagcatgtgtacttggtcttccccctcttgttggactacccatttcagcttcactaactgctctattaactaatgcaccattattaatttcaacagcaaattgctccaacatatcttgagaccataatttctgttcataaatttgtcctacgacactcacatgccaaccaatagataatgctgtggcaccatcaagttcgcctaaaaatgattgcaaaataaccatgtcttctatggtcgcaccttcaccaccatattcttttggtaacgttaattttccataaccttctttaattaaccattcaatatttttatatggaaattggctatgttgatcattatattcagccttagccttaaatgtatctccaattactttgaatttttcaatccattttctttgaatttccgttgttattaaaaaggaattatccatatcattcatattagtcaccccacacatcacacaatataaattatttattcctagtttaacactcaactttaaaaataaaaaggaacgtgctgtgaacaattaaaagaaagctgataattcgattaagtatccaattaattttctccaaaaatacaccttaaactatacaattcgctgtatggtttaaggtgatattcaaacaatactaggtttgatttaactatcaagcatctactttgtcatgtttaatacccgcaaataataaaatccatgtcacaataataaatggcaatgttaatgcaggtaagccaaacggttcaagcaatgttgttgtacctagttgcaccactacagttaataacacacctaaaaaagtcgaaatataagggttaatcgctgttttaaatgtatatcctagtgcgattgccattaatacaaagttataaccgaataacccctgattaatatcatcataattaccacctaatagagctacaatgataaagcttaacaaactagctataacagctaagagtgctgcttttcttgatgctattaatatgccgattaaaatacatacaccaccaattacactcgcttcgataaatacttgactgaatccttcaaataatgactgaatgacatgtattcgatcattgttgctaaaattaaccgtttcaatgttttgaggcattaactttaacgatgtatctacaaatttaacctgtcctgaaagtaaaattgtaaaccaagtcacaatgacaaaaggcatcgtcagcatcggaactttatatggtcttaaaacttctctcactgcagcagcgactggtaatgttaataaagttgctatcattgttataacaatatctaatcctgacttatctaaaaagattgttaacgcaatggcagttaacactggattaaatccggctaacccatcattaatctctgcttcactataattaatgtaacgtgcaaatgcataagctatgatactacctatcatagctgctaatccaactgtccagtcggccacaaataatccaatcaagataaataaaccagtccacttattactaattaacactacttgagatatatttttcaaaagcacatctatcattttcaaaatgcccaccctttttcttgaatgtttactcattaatatactaccattttacaaaaagttatattaaaaactctattttccaaatcctaaatatcttttgctattcgttttaatcataatcatatatttttaaatacgaaatagtaaatttattttttgctgttctgtattaaactttgtatattacttgtttatcacaacaattaggattaatataaattttgtaaattgtatctaatatgaaattgggggttttaatttgcattttacacaacgagagcaagacaaattaatgattgtagtggcggcggaagttgcacgtcgtcgtaaagcacgtggtttgaaactaaatcatcctgaggcattagctttaatcagcgatgaattattagaaggtgcacgcgatggtaagaccgttgcagagttaatgagttatggtagacaaattctaaacaaagaagatgtcatggatggtgtcgaacacatgattacagatatcgaaatcgaggctacgttccccgatggtactaagttaatcacagtacatcaccctattgtttaaaggaggcagtcaaatgataccaggagaaattattacaaaaagtacagaggttgaaattaataaccatcatcctgaaacagttatcgaagttgaaaatacaggagatcgaccaattcaagtgggctcacattttcatttttatgaagcaaatgcagcattagatttcgaacgtgaaatggcatatggaaaacatttagatattccagctggagcagctgttcgatttgaacctggggataaaaaagaagttcaattagttgaatatgctggcaaacgtaaaatttttggttttcgtggtatggtcaatggtcctatcgatgagtcacgtgtctatcgcccaactgatgaaaatgatgaatatgcaggcgtattcggagataacggtactgaaaacgtgaataaaaaaggaggaaaaagatcatgagctttaaaatgacgcaaaatcaatatacgagcttatacggtccaactgttggagattctattcgtttaggtgatacgaatctatttgctcaaattgaaaaagactatgcggtttatggtgaagaagctacttttggtggtggtaaatctattagagacggtatggcgcaaaatcctcgtgtaacacgtgatgacgtgaacgttgcagaccttgtcatttctaatgccgttattatcgattacgataaagtggttaaagctgatataggcattaaaaatggttatattttcgccataggtaatgccggcaacccagatataatggataatgtcgacattattataggttcaacaacagatatcattgccgctgaaggtaaaatcgtcactgctggtggtattgatactcatgttcattttattaatcctgaacaagcagaagtcgcattagaaagtggtattacgactcatattggtggtggtactggtgcttcagaaggttctaaagcaactactgtaactccaggtccatggcatattcatagaatgttagaagctaccgaaggtttaccgattaatgtcggttttacaggtaaaggacaagcaacaaatccaactgcactcattgaacaaatcaatgccggagcaattggattaaaagtacatgaagactggggtgcaacaccatctgctttgagtcatgcattagatgttgctgatgaatttgatgttcaaattgcattacatgcagatactttaaatgaagcaggatttatggaagacacaatggctgctgttaaagaccgtgtacttcatatgtaccatactgaaggtgctggtggcggtcatgcgcctgatttaattaaatccgctgcatttccaaatattttaccttcatctacaaatccaactttgccttatacacataatactgtagatgaacatttagatatggtaatgattactcaccatttaaatgcggctattcctgaagatatcgcattcgcagattcacgtattcgtaaagaaacgattgcagctgaagatgttctgcaagatatgggtgtattcagtatgattagttccgattcacaggcaatgggccgtgtaggtgaagtaattacacgaacatggcaagtagcacatcgcatgaaagaacaacgtggtcctttagatggtgattatgaacataatgataataatcgtatcaaacgttatatcgctaaatatacaattaacccagcaattacacatggtatttctgaatatgtaggatctatcgagccgggcaaactagctgatattgtcttatgggatccaattttctttggtgttaaacctgaattagttgtaaagggcggattaattaactctgccgtaaatggtgatgcaaatggttctatacctacatctgaaccgatgaagtaccgtaaaatgtatggtcaatacggcggaaaccttacaagtacgtcaatgacattcgtgtctaaaactgcttatgaaaatggtatcaatcgtgcattaaatttaaaacgcatggtgcgtccagttaaaaatattagacaattatctaaagcagatatgaaaaataacagcgcaacacctaaattagacgttgatccacaaacatatgaagtatatgtagatggagaaaaaattacaagtaatgcagcaactgagttaccattaactcaaagatacttcttattctaggaggaacatagaatgattgttgaagaaatccaaggcaatattgccaatttgtcaaattcagaaaaacaaaagcacgtcgaaaaagtataccttgaaaattcagatctcgttaaacgtattcaaagagtcgtaacagatcatggcactgaaattggcattcgtttaaaacaacctattgacttacaatatggagatattttatacgcagatgaccataatatgattgttgtggatgttaattcagaagatcttttagtgattcaaccaagaacattgcaagaaatgggagatatagcccatcaattaggaaatcgtcatttgccagcacaatttacagagactgaaatgctagtacaatatgattatttagttgaagatttattaaaaagtttaggcatcccatatgttcgagaagaccgtaaagttaataaggcttttagacatataggacattctcatgattgatcatacacacttaagattatttcagttctgtgattcacaatttccaacaggtgctttcagtcattcatttggtcttgaaacatatattcaacgaaatataattcatgatgatcatacttttattgcttggttaaaaatgtttttacaagagcaacttacctattctgatggtttagccatgcgtttagtttatgatgcattggaaaatgatgatacacaaaaagtattacacatagataagctgatgtttgttcaaaacttacctaaagaaacacgtgttggtgcaaaacaaatggggactcgcatggttaaattggctttagaactttataatagcccatggattgcttggtatcatcaacaaatgcaagataagaaagcaaagttaaatccagctatttgttttactatgctaggccattatttaggtgtagatattgaaacgattattgattactatttatatcaaaatgtttcaagtttaactcaaaatgctgttcgtgctattccacttggacaaactgctggtcaaaagatagttactcacatgattccttatatagaagaaacaagaaagcagattttcgaattaaaagaagcagattttggcatgacagcgcctggtttagaactaaatcaaatggcgcatgagaatgtcaatgttagaattttcatatcataggaggttataattgtggcaaatccgattaaaattggtattggtggtcctgtaggtgcaggtaaaacacaattaattgaaaaagttgtaaaacgtctttcaaaagaaatgagcatcggcgttattacaaatgatatatatacaaaagaagacgaaaagatattagtaaattcaggagttctacctgaaagtcgaatcattggtgttgaaactggtggatgtcctcatactgcgattcgtgaagatgcatctatgaactttgcagcaatagacgaattattagaacgtcatgacgatatagaactaattttcatagaatctggtggcgataacttagcagcaacatttagtccagaacttgttgacttttcaatttatattatcgatgttgctcaaggtgaaaagattccacgtaaaggtggtcaaggtatgattaagtcagatttctttgtaattaacaaaactgatttagctccctatgttggtgcatcattagaacaaatggctgaagatactaaagtatttcgtggtaaacgtccatttacttttactaacttaaaaaccgacgaaggtttggatgaagttatcgattggattgaacgcgacactttactcaaaggattatcataatggatgaacaacaatggactgggcaacttgatttaacagtgttttttgatggcaatcgatcagtgtcaagagatattttctttgaaaaagcacttaaagtgatacgtccagtttatctaaatcaatctaccattcctacattttatatagtaaatgtaggtggtggctatttagatggagatcgttaccgtatgaatgtgaatgtcgaagataacgctaaagtgacattgacatctcaaggtgcaacaaaaatatacaagacaccttccaatcatgttgagcagtatcaaacttttaatttgaaagataacgcatatttagaatatgtcgctgatccaatcatcgcatatgaaaatgctaaattttatcaacacaatacgttcaatctcaataattctagttcattattttatactgatattttaactcctggttattcaaaaactggcgaagccttcaagtatcaatatatgcatttaataaatgaaatttatattgaagatgagttagtcacatatgataatttattattgaatcctaataaacaatcgatcaatgaaataggttatatggaacattactctcattatggctctgcttacttcatacacgaagatgttaaccaaaaactaatcgattcagtttatgaaaccattagttcttacagcaatacattcgattgtcgtgttgctatttctcaattgcctacacatggttttgcagttagaatttttgcttatcgcacacaaattatagagaaaatacttggaaccatccaaagctatatcgcagaaaatatttatgatcgtaaacttgattttctaagaaaatattaaaataaaaagactagtgtaccttgtttcaagcttaataagctgaaataaggtatggctagtctttaactttaattaaagcatcttcaatatttaaattttaagttaattttatgtcccaatgctgaataaataacttcgttttaataaattgttatcgttcaatgttattaaacgcaattaaccttgatttaatttttaatgtattcttctaattctgaaatcagtttttgaatatttgctttttgtgtatctgtaacataaacaataactgttctttcgtcttgtaaacttcttttctttgataacaattttaaatcttttagcttttgtaaagctttagttaaatagtaaggtttgaactctgagcacttagcaatctctttagatgagatttcgttagactcacttcttaaaatatgatttaaaatataaatttcttcatagttcaaattgaacttcttttttgtatctctgaaaaacttcttaacttgaaatgttgcgttgactaaatcattaatgtcattaattttactcattattaaaccactcctctgatgcacatcttgttgtagcaaggttcacatgtaatttattaaatcgaaactctatccaactatgttataaagttcattctaaacaaataagtataaaaattcaatatttttattactagaatatggttaaatacatttatttcttataataatttgatgtttaagatattttgtcaaattgaaaattattagtctgaatattttgtatcttaactgatatgtaaacttttaaaattttaatctatatcaacgtgtttgatttgatattttttatattaattggatggcttgctcacaaaatttataaaatataaaaaaagaagagctttaaatcataacgcatgccatttatctttaaatgcaatgagttatcattcaaactcttcttatcaacctacatacattgacattatactatcatatgttgttttacatattcaacaaacatttcaacgttattacttttaatatcatgcattgggacattaccaatattaaatttgaacattatagtttgaccatcataatctatcttttctatttcattataactaatacttctataataaaattggccattcatatctacattcataattaatctttcatttgttgctataaatgccccttcaaattcattcgcaccttgaacttgatactcaattattcctaacactgacggaccctttttttcagttggaaataaatcatttggattcacattatctaaaatcataatatccctcccacttaaaactataaactattcttcataggtatatgaaatacaagtgattaactatttattattaagcttaacttgtattcccttttcaagataattataacatgcttgaataagcatagtgactttagaaaacttttcccgcttgattgttacaataacacgcctttcatctaattcacatctctcttttttaactaatcctttcaaaattaaacactttaaaatcggactaaccgcaaatatcgggtgatggaattcaccctgtaattctttaaccgtcaattgacctttatgcagatttaatattcctaaaacgtataactcttctaatgataattgacacatatttaaataacactttagatttagcaataattcttgtgacgacaataaatacgatacatagtcacaactaaaatcaaatgtatattgaccaaaataacgttcaatatagtcactaagctcattattcatatattctattttatctatatgcattttattaatcgaaatagtcaatttacgttgatccctttgatctcttgctttcaatagccattgatgattgtttaaataacttaacatttgaagaagtgccatcttagattggatttctttcatttttaataacctatctattgaagcgctattggaatcagaattatcatatttaactaatagatttaatagtttcacttgagtcaaagtgagatgaaatgaatatttcaacatatcattaatgactttcaacattagtatgtgtgcagttaaacgcttaactttaaatttagacatctttaaaacctctcttaaaccatgcctatatctcaagatgatatttcaaatgaacaatactattgcttgagaccattaatgaatgatcataaatatttctttctataaaattagctttccaataactgtgttgttgcataatatcattcacaagtacaccattttcggaagtatgattatctttatctatacttaaaacaatttgtttagttttagcatggctaaattgttgaagacccttacacgataaacgtatagcgtctgaattctcatttaacaatgcggctggcaaacaaatgacacattgtacttcatgtttgaacttcgttacaatcatcgtgtcattttgataaataacaatccctcgtaattgattaagtatatttatgataaaaatgaatattgataatctagtcaaatttatttctttgctcgcttcacttataattgacatgtgcataataagtcctcgaaattttgtataatttgtcaaaagttcagtaaccttattaatatcagacattgtgattttttcttttaagtcattattctcattaatcaaatctacatcacatataattttagaacgtgcaatagacacctgttctatttgtcttagcggtaagataaaatagtctattagatgatcaatttctttatcatagcgcgtattcaactcatttggttccagatgatatattaattcaaatactcctatataattatctattaaacgtttcagtttttgaattgcagtagtatttaagtcgttaattaaaaatgcaatcttacatctattactctcaaaagtcatattaaaaattgtagctactagcttttctatcttgcctctttcagtactcgttaacaattccttatattcatgtttaatacgaaatactacatttacattgtaattcactatcttttgaagtaataaagtgatttgttcaatcgatagctcattgcttgtgtcgattgtaacaattatatgcaagttttcaggattaacacctaatctttgaatgatttgtttaatagtatagtaatccatccaataaaaattacttcctttaatatagatgtttttaggttgatacatttgactcctttttgtaggctcaaaaggtatatcaatctcgcgcatacttgaagaactttgattagtatcatcaaataattcaattatattttatcaatttcaactaattgggaatggttaattgaatgagatgttggactatttctttttctaattaatttaggagtgtcaccatacgtttctttaaagaggtgtataaaacgagaataatgattaaaaccatgactacttgcgatttcttcaatgggcttcttagaagttaaaatatcaattaagcaatgctccagtctaatatgatttaaatattgaataaaattactataaggtgtcgctttaaacatgtcacttaaagctttgtttgtgatactaacttgattaatgacatctttcctatttatctttttatggtggttgtttgttaaataatcgtgcacttcttcggctactaaatgacgactaccatcgtatgtatttaatgacattaattcaacacacatataattaataatcttatcattagcattataaggctgttgtttaattttgctgtagattaaatacttaatcaagattctaaaagtgctagcaacctcatttgttaatatcttgccacgcatcatatagtttgcattcataaacttcaaaaatgtctttgcacttacttcaacaacacaacatacactatcatcatgaccatcaatctgatacaaatcattcaacataataacggtgacatcatttcttttcacatcatattgttgtagattgattgaaactacacctgtaccttgaagccaatatataatttttaagtttgcttccttcacactactcattttcatacttttaaaaatatgtagtgaataattatctgtcatcttacatcctcacatatacaaatatattgatttactcctgtttgtctttctcaaatcaattgtcaacatctaatattcactaccaattatatcgccacatgttttttagcagtaacaaaacataaatcgattatatcaaataatacttttattaaaacatttttttatgctaaattaggatattttatccattaaatatacatttttatccaaataccaaagctttcctaaccaaagaaatttgatcgttcgtgtcgaatttttatgcattttctgattaaaagtcctatattatgcacaaaatatacatttagaattttcagtaatattacaaatttgtaacatgcttattttcgaaacattcagtttttacaaagaatgccgtagttataagttttgcaaaatgcaaatttctatacttttacaattctattgtgtcaagatattagcaaaaaattacaaaacgttaacaaagcacacaaggacgctaatttctgttatagtctttcttgtcgtttaattacgagagataacttataacattaattttgtcacacggacattacgaaaatattttagatttaaaatttttaggaggatatttttaaaatgaagaaaatcgctacagctactatcgcaactgcaggattcgctacaatcgcaattgcatcaggaaatcaagctcatgcttctgagcaagataactacggttataatccaaatgacccaacatcatatagctatacttacactattgatgcacaaggtaactaccattacacatggaaaggtaactggcatccaagtcaattaaaccaagataatggctactacagctattactactacaatggctacaataactatagctacaacaattacaacaacggttatagctacaataactacagccgttacaacaactactcaaataataatcaatcatataactacaacaactataatagttacaacacaaacagctaccgtactggtggtttaggtgcaagctacagcacttcaagcaacaatgttcaagtaactacaactatggctccatcatcaaatggccgttcaatctcaagtggttatacttcaggacgtaacttatacacttctggtcaatgtacatactacgtatttgatcgtgtaggtggtaaaatcggttcaacttggggcaatgcaagtaactgggctaacgcagctgcaagagctggttacacagtgaacaatacaccaaaagctggtgcaattatgcaaacaactcaaggtgcatacggtcacgttgcatacgttgaaagtgttaacagcaatggttcagtaagagtttcagaaatgaactatggttatggcccaggtgttgtaacttcacgtacaatctcagctagccaagctgctggttataacttcattcactaatttgtgatgaaagtgaattaagccaacaaggtttcaagagccttgttggcttttttaatttctagacatcaaaaaatcggattggtaaaaatctcaaaacttcgatttccaccaatccgattcactctgtaataaagaataaacaacatacagccattgacacacccaaatttaggcgcgtcaaatcggctatacattgataaatttttagttaaagtacttacaaatatacttgccttcaaattctcaattaatttagtcattacatgccatgacataaagcttacattacatatattaacatgttccgctacaaaacatattcagtatatgtatagaggatatttattctaagttaaaaccttttcaaattataaccgctacaattataaatgattaaagtgtttcaacatattatatatattccacgctcacattaagttaaacgtgaattcgatgactttttaatacctattcctgtaaaaccatagataattgctataattgcgcataaataacatggtactgtccatatgaaaaattctccaacagagacatgaagttgattcgtatagtaaatacctgatgttccccatggtattaaaggtaaaaccatcgtacttgagtcttcaagtgttcttgataaaacggaacgagagacttggtatttttcgaacaaatctttcattaacacaccgaccataataattacaatcgaagcaacacctgcagcgaatacaagcgcaatacaacaaataacggtaatacatattaaacttcctacagaatggatgcctttagaaatagtagttaataagacttctaaacatcctgctttttctacaatacctgcaaatgcatatccgcaaaatatcgttactaatatttgggtcatactcatcataccaccctgttctaacaagcttttcacactggatgaaatatgagactgatgtatcattgagtcgttaaaaccactaaatgttgctttgaaaccatctgtcattttgaaatgatgattaaaagtccccactataatggcagaaaagcttgatattagcatagctggcactgtagccattttaaatagcaaacaaacaatgatcacaattaagggaacccagacccatatgttaatttgataaatctgtgcaagctctgataacaatgtttgaatctgcttatcatttgaatgccctttaaattgaaatccagcaataaaccatactaataaaccgatgattgacgcaggtattgttgtccacatcattgaatgaatgtgtttaaatatattcactttagtgacaagcgccgctaaattagttgtatctgataaaggtgacattttatcgccaaatacagcgcctgctataatagcacccgcagccattcctggtgagatacttaattgattaccgatagaaataagtgcaatccctgcagttgatgcagagccccatgctgtaccagttgctacagatgtaacagcacttataaaaaaggctgatattaaaaaatagcttggattcaataaatctaagccataataaatcaaggctggcactgtgccagaaaacatccaactgcctactataattcctaccgctagtataattaaaattgcaggcattgcagtatttaaacgttctgcaatgcctgtttctaaatcttgccatgttaagcctacacgttttgcaatccatgcggcatatgctgaggcaataattaataatacttgaattggaatatcaaaaaacacaaagcctgttacaacaacaataaccattacaatcattgtcgaaattgattctaaaaaggttggttttcttgtcatcatctatcgtccccttcgcttattgatgagaaacctcttttcttcaatttattgcttttgcataatgctatatccttttctatcttcaagccatcatttattttaaatatttttctaaatcaagcttatctaagccaatggattcaactgttaagccttcctcaaagaagtctctctctaaaatggttgatgcaatgacaattactgcatctatatttggtgtcggtacatcaataacacgacctaagcttgaccataatactaaaccatatgcaatatcctcagttaaatatctgctttctacatgatttggtcctggaatttgtgaaaatactgggcttgtattaaacaaacgatttaatggttcatcttctttatcacgttctaaataaccacgttcaatacgtgattctttagctgttgataattcaaaacctaatctacggcctaaatttaaacgttctaattcgattgcatgaagtaatctaactgtatgtttagtaattccttctttatataaagcgaactcaccagcataatcaatacgaccgacattcaataatgttggccctggatgcacttcaggattaccattttcaagatttgttttaattaagctttcctcttttactaaatgatcataaatacttgaaactttgtcataacaatcatttagacagcttctatcatatgttgaaaagaagatacgacgtacatttagagataaatcaactgctgcattttcaaaatcgacacgcgtaccatacgtcaacgtattagcttctgctaattgtggttttgtttcaatatgtctatcttctaaaacattcataaaacgaattgaccccattgctgcagccatgttgaagaatatcaactgattatcagttacatgctctgccattacatcagcataatattctatgtatgaagatggaataatcacttgaacaatttcagcatcttttaaaacatattccatatcatcactaatatcagtgaattttacgaaacgttcatcaccttcattattaaaatcaaatccgcccttttcgattgcgttttgaaacttacttatagattgattacgacaatataatttaacatcgtggcctttgctcaccatatctactgctgccgtaactgcgccatttcctgatcctacaattgctattttcataaacaaccctctttctatctttggttaaaattaaaaacaaattatacgtaagacaatataaaaatgatgcgaattcattacgcatcattataaatgttaagtatatataaccttaaattaacctatttaaacgccgacgtccaccaattatttttatttttaataattgtttaataaacatgtttatttttgattatattttgttatagttaaagataatattacaattttcaaaggagtgtctaatatgacaactgaaatgaacgacgtaacaaatcatcaaccgaatcgcaaatccaatgatgagaacattatggcgatgcttatctatttattaagtttattcacatctattattggtccactgattatatggttattgaaaaaagatgaatcgaaactagttgatcgtgctggaaaaaattatcttaactatacgatttcttatattatttggtctatcgttttagtcgttatcacttttataggcgttttcctaattgctaccgatattgatttcattatcattataggtttcatcattacgtttatcggtattttatccatattcgctttctcaattttatcttttgtattcacaattattgcgtgtgtcaaatattataatggccaagaatatgtaatacctttaacaattcgatttatttaaacatattacaaataaatatttcctattaattatctgttaatctcactgtaactttgactaatttttattacaaaattagtcaaagtttttttattcttttacaaatcaataacattccccacaagaagcatcaattttgttaaagtaactattgtcatcaattcgagatgtgagaataaaacagtcgctacgttttatttataaaaaaagatatagaactttggaggactttattcatgaaaaaattagtaacagcaactacgttaacagcaggaattggtacagcattagtaggtcatgcacaacatgcagacgctgctgaaaattatacaaattataacaactataactataatacgactcaaactacaacgactacaacaactacgacaactacatcatcaatttcacattctggtaacttatacactgcaggacaatgtacttggtatgtatatgataaagtaggcggagaaatcggatctacttggggaaatgctaataattgggctgctgctgcacaaggtgctggattcacagtaaaccatacaccttctaaaggcgctatcctacaatcttctgaaggaccatttggtcacgttgcatatgtagaaagtgtaaacagtgatggttcagttacaatttcagaaatgaattatagtggcggacctttctcagtaagctcaagaactatttctgcaagtgaagcaggtaactataactacatccatatttaatttaaacacgatgatacatattgtcttgaaacttaattctagtacatatgtcatcaaaaactttgagctttcctttataggagaagctctttttttgctatttttcattgccacctacttatatatatttcctcccatattcataatattaattttttcaatactattaactttaaaactacgttatctaatttaattgatccagttttccacattacaatattcatagttctacagtgactaagttatatcacctccatcaaaagtacacgcttacatcattgatacacaagacatcatgacatagttgtatactgtctaatcttctactatactaagataaaaggagtgatcttttatggaaaaagtttatgttgctggtgcaataccagaagtaggtttaaaacttttacaagaacattttgaagttgaaatgtatgaaggtaaaggattagtcgataaagacactttaattaaaggtgttaaagatgcgactgccttaattagtttattatctacaaacgttgataaagatgttatcgatgctggtaaagacttaaaaatcattgccaactatggtgctggttttaataatattgatatcgagtatgctcgagaaaaaagtatagatgttacaaacacacctaaagcatcaacaaacgcgactgctgatttaacaattggattagtacttgcagtagcgcgtcgtattgttgaaggcgaccaattatcacgtacaactggatttgacggatgggcacctttatttttcagaggtagagaagtatctgggaaaacaatcggcattatcggtttaggtgaaattggtagtgcagtagcgcgtcgtgcaagagcatttgacatggatgtactatacacaggacctaatcgcaaagaagaaaaagaacgagaaatcggtgcaaaatatgtagatttagatacactattaaagaatgcagattttatcactatcaacgctgcttacaatcctaaaatgcatcatttaattgatacagaacaatttaaaatgatgaaatctacggcgtatttaatcaatgcctctcgtggtccaatcgtgcacgaacaagcactagtgcaagcattgaaaaataatgaaattgaaggtgctgcacttgatgtatatgaattcgaaccagacattaccgatgacttaaaatcacttaataatgtagtattaacaccgcatattggtaatgctacatttgaagcacgtgacatgatgtctaaaattgttgctaatgctgcaattagtgccgttcaaggtgagaaaccacaatttgtcgttaactaataattgaatttattataatgacattataaaaacaagaccccccatatgttgagctctaatttcaacatacgggggttttcatattgttgtattacttttctttcgatttatataagaatttagtctgtccagctgctaatgcatttggcatcattttcataatacgatttctaactgcaacaactaaacgactacgatattgggcaattttaccgatttttctagaacgtttaattacttttgcagtatgtttgacacgtattttatcataacgctgtaatgctttttcaaagtcgtatgcattaaaacaatttactaatacgatagcatcttccattgcttgtccagcaccttgccccatattaggcgttgtcgcatgtgctgcatctcctagtaaaatagtacgaccataaacaaaagatttgagtggtttcaaatcataaatattatgcaataagatacctgtttcactttgtttgtctaagatctctctaacttcatttggatagtgattaaagtatgcttgcaaatgaggtttaccaaacgaactatatttatgattgttttccttcgagttaattgtaatgaaccagtatgcttgattatttaataacggaacaatacctactcttccttttcttccccagtattcttttgcacaatccggatgttttaaatcaatatcatcaattaaacctctaaagcatgtatacccttgatataatactttactgtcagcatttacagattgtctcactttagaatgaattccatcagcaccaatacataaatcaaatgcttcactctcttgttccgcgaaatgtatggtaactttatctgtctcattatctatatgcgtgacttcatgatttgtaaatattgcatcatcttttacataagatttaataatgtcaattaaagtttggcgtggtaacgtcacattcaatgtattactttttaatttaactgtagttaacgggcgatctttgtcatctaacactgtcattgtagataagatttgcccagcatttttaatacctttagctaagtcatgattacctagttttttaagcacattatctccgataccaatcccagcgccaatttctttaactgactcatttttttcaaagactttaatagtatgaccttgttcttgtaatagtgcagcagctgttaatccaccgatgcctgcacctataattgctatcttcatattgtcacctctatatttttcattcttttctattttatcacatgcactattgtttaaaaatgactcttggaactaacgtttcatttttaaagacttaagtgtattatctgcaccattgtatattacatgcacatttagacagcaatattcatttacataatgtacatttgtaacaatgatgtgggagcttgggacataaatcaatgtcctagggtctataatattatattggcagtagttgactgaacgaaaatgcgcttgcaacaagcttttttcaactctagtcaggggccccaacaaagagaatttcgaaaagaaattctacaggcaatgcgagttggggtgtgagtcccaacaaagagaaattggattcccaatttctacagacaatgcaagttggcggggccccaacaaagagaaattggattcccaatttctacagacaatgcaagttggggtgggacaacgaaataaattttgtaaaaatatcatttctgtcccactcccgcgttttatgttaggttaaaatccatttaactaacacactcagaatgcgctaaaggagctcgaaacaataaattgttccagcccctttaagcaccgatgtcttatttataatatgtttgtctaatatcatctttctttataccaaactgcttataggatttatccattaatttggcaattttatctgcccagcgaatgtcactcgcatattgatgttgcgcaggattttctggattccatcgcatttgatataaattcagttgattgttttcaaaatattcattacgaatgaactttgcaccaccaagtatcgccttatctggtgatgtccattgttccttttcagcataacttttcccactacgaacagcactactatcgaatgctcctataccaaaaaagttgtaatagcgtttttttccatctttaatgccttttgctaattctgatttgccgttacctgtttctactaatgcatggctaacaagataaatgacattaacctcatatttttcttgagcttctagaaaaactttccctcgattttctaaaatccccttaccttttagcaattgattaacttcagattccgacattggcactttttctgtgatatccatatacttcatatcattgtctttatgtgaaatagtcattgctttagcaatttcattattatttgcttcaacaaatttaccatcctcttcttttgtctgtacaatacctttcccttgttgcattgaaacagcctcatcaaaagagtaattcacatcatttttaaacaatttagtttcattcacgatgagcaatacagaaaaaacaactaaaataactatcaatagtagcgttgaaatacgtaacttgaaattcttcttcatatagacaaaacctcatttttcttacttagacaataaaaaatatgccactacaatcgctaatattacgattaaaaaagaagcgttaacgattactttcatcgttgttctatctctgaacatcatattaaagacaactagactaattgataatgaaacagcaaaaaaagtaatagctaacactaatttcatcataaatagacagactaaacctatgactaataatgtattagaaattacagctgacgtttttaacattctcgaattaatatgcactcaccctttttatttaaataacttacataatcataataatacatgatgtttcatagccctgtcgatggttgattatcaatagcacatgattttctcgattctcaaaaatattgtttgaagtttgatgaagactcggatacaaataatatttcaatataacttaaaacagtgcccctacaccgacatgcagaaacactgttatattcaaaaacaaaaaatcggaaagatgaaaagtaaaaaacttttacatcaatccgatttattatagactcatattaatcttctcgagacataccttttaacatattaagcatatatgttaaactacggttcatgtcgtcatcttttaaaacgcctaatagacttcttacagatgtcttcgcattaggactcgcttgattggcaacgtgtaaacctttgttaactttattaaggaagtcacttaaatctgatacattcaattcgcctaataaaaataccattgaagccatattagataatagccctgtataaatatctttgttgagctcaacagcaaatttattaataatcacttgacgtcctctaactgcgccatttaaagcatctaatagttttgcatcatctaatgttttaatgagcttgattgcttttaaaatgctatctttgtttgcagcaattgcctctgtaacttcatttaaactttctaacttaatttgttcttctgatttttctaagcgtctaattttagaagatattctctcagccattatttatccacctgatttcccgggaaaacataatctggacgttcccattttttctgtacttgaacactgtactgcggatgacgttttttattgacacggaaattattagggttcaacggtgacttaccacgtttcgtaattacctccatacgacagcttgtacgtttataagatggtgtatccgtgtattgatcaacatcactattagttaataagttaattgcgcctagatctccattttccatcgcatcattatttaatggaatatagatttctttacctttaacacgatctgtcacgtgaacttgtaataccgcttctcctgtttcagatatcaacttaacttctgcaccttcatgaatgcctctatcttcagcaagttctggagaaatttcaacaaatgcacgtggcactttgtatttaagcattggtgtttgatatgtcatgttaccttcgtggaagtgctctaacaatcgaccattgtttacatgaatatcataaacttcatcttgcttaaagtaattatcaaatgataatgggaataattttgctttaccattatcgaaattaaatccttctaaataaagtattggttcatctgtaccatctggatgcacaggccattgtaaactattaaatccttctaaacgttcgtagcttacgccagcatataatggtgttagtctagcaatttcatccataatttcgcttggatgtttgtaattccaatcgaaacttaatttattagcaattgcttggaatattttccagtcaggtttagaatcacctaatggtttcaatgcttggtataaacgttgaatacgtcgctctgtatttgtaaaagtaccatctttttctaatgaaggacttgctggcaagacaacatctgcatatgttgctgtgaatgttaaaaattcatcttggactaccatgaaatctaatttttcaaaagcagcttgtacaaaattaatatttgaatctacaataccagtatcttctccatatagatataatgagtgaatttgcccatcatggataccttcaaccatttcatgattatctttaccagctttcggattcaatttaacgccatattctttttcgaatttagcgcgaatatcgtccgcttcaatactttgatagccagtaattttatcaggcatactacccatatcactacaaccttgaacattattatgtccacgtaatggatacgcgcctgtaccaggtcgacgataatttccagtaactaataataagtttgaaattgctgtacttgaatcacttccaatgtcttgttgtgtgatacccattgcccaacaaatgacaacggactcagctttggcacattcttcagcgaacttaatcaactctgcttctggaataccagtagcctcttcagcgaatgccattgtaaatgtttctaatgacttgtaatattcatcaaaatcttcaacccactcttcgataaaggctttatcgtgtaagtcatgatcaatgatatatttcgtcactgcgcttaaccaagccaaatctgtacctggtttcggttgataaaaacgatctgcgcgttcagccatttcatgttttctaatatcaaacacatgtattttttgtccaaataatttttgagcacgcttcatgcgtgatgcaataaccggatgtgcttcagctgtattcgtaccaatcaatacagacattgctgctttttctaaatcttcaatactacctgagtcaccgccgtgtccaaccgttctaaataagccttttgttgcaggtgcttggcaatatcttgaacagttatcaacgttatttgtgccaataacttgtcttgctaatttttgcattaaatacgattcttcattcgtcgctttagaagaagaaatgaatgataatgcatctggaccatgcttttctttaatagatgtaaaattatctgcaatgacatttaatgcttcatcccattctacttcatggaactcaccatttttccttactaatggtttcgttaagcgttgatctgaattaatatgtccccatgaaaacttacctttaacacaagttgcaattttatttgctggagaatcatgtgatggttgtacttttaaaatttctctatctttagtccaaacttcaaatgaacagcccacaccacaatatgtacacactgttttagttttcttaatacgctctttacgcatttctgcttctgaatctgagattgcaaatagtggaccataaccaggttctgcttttttagttaaatcaatcattgccgctaatgaaccaggttccgtatcagtcatataacctgcattaccttccatgttaacttccatcatcgcattacatgggcatacagttgcgcattgaccacaagatacacatgacgattcattaatcggtacatcattatcccaaatgacacgtggatgctcacgatcccaatcaattctaattgtttcatttacttcaatatcttgacacgcttctacacaacggccacataagatacattgatttggatcatagcgataaaatgggccataatctttttcatatggcttctctttatattcatacgtttgatgctgaagcccccatgcatccatcgtattatgaatttcacaatcaccattattataatcacatactgtacaatacagcatatgcttttctaaaattcgatcaagcgcttctttttgagcatctttcacgtcattattcactgtatttactgtcattggacgatcaatcactgtactacatgaacgttcaattttaccatcaatctcaactgtacatgtatcacacgtttgtatcggtcccattgattcgttataacaaattgaaggcacaaaagtatcttgcgatttaatgaattcaagtaaatttgtacctggttctacaagataatctttaccatcaagcgtgaccaccaaatgttcttgcatactattcaccccatctatatatttttccgtaaatgacttttaataaattgcctaatttccacctaaaataaagatgccccacacatctttcagatagaatcaatataattgtattactttaagtgtataatgttaagcgtatttttgtattttttatttttgcaatcatttttatttgaaatattttgcgcgaaattaaatcatctttttgtttaattgaaaataattatcattattagttttccaattatctgtgtcacgctttttgccatatctttcacaaccttattaatgacaatacttaataatcacctcacctaaaaatcgctatactatttataaataccctttttctgaaaattaataacccaagtttgataaatatctactgccatttataaggtaagatttatctttaaattaaatttgtaatggaataatttgtaaaaatcaaatcaggcattaaataaaatagcccataaatacaaagtgttatcaccttctatttacgggctattaattctattcgttattctttttacagctcattctatctaattaatttgtgtgcaaatttgataacttattttcccttagtttactactctagattatcttttaataacttagtactttcagcttttgactgctcactaggaatgaagtagtacaatccgtcactttgaatgccgccttgaccactcaattgatgtttattaattgtgtcattagcatctttataattgcttctaatcgtattcaaatcacctaatgttaaatctgttttaacattattttgaatttcattcattagactattaaaatgtgtaatcgatgatgggcttgcaatcttattagccatcgcttcaagtacaatttgctgacgttgttgtcgaccaaagtcaccaccagcaccttcttctttacgacttctaataaacttcaatgcttgatcaccatttacatgtgtttgctgtccttttgtaaaacgaacaccatcaacagtgaatgtatcattacttactacatcaacaccgccgatactatctatcatattatgcaaaccatccatatcgattgtcgcataatgatcaattggcacattcatcaatttttcaagtgatttaacagccatatttggtccaccatatgcataggcatgtgcaattttttcagtagtaccacggccaacaatttccgctcttgtatcacgcggtatacttactatttcagttttctttgttttagggttgatagataaaatcataatactatcactacgctctccgccaccctttttcttacgatcagcatctgaatcgacaccaaataaagcgattgtgaatggatcaccatcgtttaaactcacttttttacctcttaattctgaatgattacgatctaacggattgtgtatcttattaccagtaataaaaattttagcagctacatacacaacagctacaatcgctaagattactaaaataccgaatacccataaaaatatttttttcggtaggctcattttacttttagacgaacgtttcaatcccaccactcctttactattccttacatactttgtctggtttctctatttattatatagtaaaataatttttttactatacttctgtagacgtataactattttttatcattttttatctctcgagaatatctatctgtatttttgataaccaccatttgcatttaaaattttaagtaccgtttcatgacatgctttattacttataataaaaggtgcaccctttaaatgatcaattgccttaccatctaaagttgtcatttttagattcaatagttctgcaaataaaaactgtgcagcaatgtcccaaggtttaggatttgtattaatatgtgccccaaattgaccttttgccactcgcatagaatctaatccgcaagcaccaactaaacgataactaaatgaggcgtcaaataaatcttgcaccgtatccagattcatcacttgtgcattaaacgatataatagcgtcttccaattttaacgatggtggttcttccatcttaaatccattacaaaaagcaccttctcctcgtattgctttataaagctttttatgcggataatcatatacgtacgataacattggtttaccttcataaaaatacgccaatataatacaataatcttcttgctgttttactaaattggcagttccatcaatgggatccataatccataaatgattaatttcattcgtaatcatttcattacttttttcttccgctaatagttggtgttccggaaaatgtgttgctaaaaattgttgaaattgttgttgaatctgtttatctacatttgtaactaaatcaaatcgatgacgcttggtttctgtagtcatctccataattaattgtggaatcacattgtctatttgtttcaaccacgaacatattaacttatctatttgctgtaatgttttatctgtcatttcgtccaccacttctcatatcattatcattttattattaccctatattaaaagaatcaacaatacaactgaagacttcttcattttatgcataaaaaaatcggctagtcacgtgctagccgacaaatagaaaggaaagtaagtaataaatattgaagatgttgtgatgtaacttgaacgattaaaagctatctgttatatagctctacccctttgtttaatcgctccccctgttacaagtaatatcatagcacaatcttttttaaaatgtaagcgttttccacaaaatttttccgatttttttaaaaagatattgaaaatgtcctcattgtcactcttatgttatactttgtgtaatatatcatcttttaggaggtggctgtcatgaataaagctgaaaggcaaaatttaataattactgcaattcaacaaaataaaaaaatgaccgctttagaattagctaaatattgcaacgtatccaaacgcacaattttaagagatattgatgatttagaaaatcaaggtgttaaaatttatgcgcattatgggaaaaatggtggttaccaaatacaacaagcacaatctaaaattgcattaaacttatctgaaacacaattatcggccttatttttagtgcttaatgaaagtcagtcgtactcgacattaccatataaaagcgaaatcaacgcaattataaaacaatgtttaagtcttccacaaacacgcttaagaaagttgcttaagcgcatggacttttatattaaatttgatgacacacaacatatgacactcccaatgttgttttccgacattttaatttattgtacagaacgaaatgtgatgttagtagatcatagggttgatgataatattaaagccgaaaacgttatatttattggccttttgtgtaaacatggacattggcatgcagtcatttatgacattgctcaagacaaaactgccgaactcgaaattgaaaatattatagatatttcgtattcattcggtaagacgattcaaaccagagacatatccattgataactatcatcaatttttaaaccccatcgattcctaaactatggagtcgacggggttttatctacgcataaatacttattactgatataacgaaagaaacaaaattatttgctatatgtaatgcaattgttgaacctaggtttcttccagattttatataagtgaaaactaatatgatggatagtatgagatatggaccaaactcaaacggcgactttgcatccgtcacatgaataaatgcaaataagaacaccgaaacaatactcatagctataaaattaaacttcttacctaattctccaattaaaatatgtctaaatacgatttcttcaactattggacctacaatcacaattaataagaatgctacaggtaaaaatgcaggcacttcaaacattttatttagctcaagttcattggctgtttcactatattgcaaatgtttaggtagaaactgtgtcatatattcatatgtataaattaagatgagagcaataatatacgttattgacaatctaagccaatattttttgatatacgcaaaaccagctcgaagccttgatggcatcacttttaaatgaaataaataaaatgcgccaatcccaatcgtatatgctaaagcttgtgtgatagtcgctacaaatatcagattactatcgatttcataataaccaaacaaaattggtcctatgtaagctgcaattgtgagtgcataaaatataacacctataattggaattataagcaaatctctccatgctatatctttaaacgtgtatttctttttttcattttccactgttatatcctttcctgtttaataattgatttttggaggtacttctacatgataaacgaaactaagtatatgagacaacaaattactaatttgattcaaatcattgatacgattaaatataatactttaatgacagattggaacattcaaacgcatatttataaatttaaccaaatagttactaatgaattgaataagttcaaaggctttgaaacatcatatataataaacgaaaatcaagttttctattatgaaattataacactacttaataaacgtcccctccgacaagtcgactatggtaacaaaattcaatatcttaatttttatcatacagaactatctaacgcattatttgcaattaaatttgctcattaacctatttttcataaaatgtcatttaaacaagttatttattaaaattcactttattacataaattatacaattaaaaagtttcttcaaattgtaaagatgcattaatcgagttataatcataatgattaagatggtagatttagtcttatataactacatttactaagatttaaatagatgagtacataatgtataaattgggaatatacagtatgacttacggtaatatatcagtatattgatatattatttgcacatgggagtatgctattttttatctatacatcttaaaaaaatttacagttttataattcaatatcattaaacaaacaacatattcagcttatttttcattctcttacgttacaagttgtaaataccatcgcgttaaacaacaatagccaacgctaataaaatatattgcgttaaagtggagtgattaatatgtcaaacgtactaacagaaatagatagtcaatatccatatatgactaaaaatgaaaaaaagatagctaaatttatactaaattcacctcaaaaggtgattaaaatgaggtctcaagacttagcaagcttattagatattagtacatcatcagtcattcgattcagcaagaaaattactgatggcggttttcacgacttgaaaataaatatatctaaatatgttcctaaagcatcatcaatttacaatgttgaattaatgaataacgaaagcacagaatctttaagaactaaactccatacacgtactacacgcgcacttaatcatgcaaataacgaattaaatgataaaactattgatcaaatatgtcattgtttaaaacgttctgagacgatttttatatatggttttggcgcatcttttgtagttgctaccgacttataccaaaagttatcaagaataggtcttaatattcaacttgttcaagaaacacatatttttgcaacattattagcaactcacaattcgaacgatagtgttattcttattactaacaatggtacacaaagtgaaatgcaatcaatggttaaagttattgatgactaccatatacctataatcacaattactagtacaagggataatcccgtagcacaggcatcaaatattgttttaacatatgggaaaactgatgaaaatgagatgcatatgggagcaacaacttcattatttgctcaaatgttcactattgatattttatattatcgttatgttgcattaaattatcacgcatcattagatttcataacacaatctaaaatggctttagataactatcgtaaacatttatcaaatattaactttaaacattaacagtcttatataaattctttaatcatgtcatataataatttatgcatcattttcaaagcttacatgtcttttatcttgtataacatacgcatatgaccaatgatttgataaggccattctatttcttatattaaaaacaaacgcagttgattaacggattcattccatatatcaattgcgtttgttattttaataatgctatttttttaagcccacagtaaaaactaacgatagtattgccacttataagtaaattcatactacatctttgttttaagctatatttataaaaaatgcgcctactcataacatttctttggctatttaactttaataagctagggccaagtttgtcataaaataagcgcacattattatcatactattttgcttttacattatttttattatatctaataaaataataaatcgttacaatcgttaagaagatgacaccaataagcactgatattctagtttcaacattaaataccataccgaccaatactaatattaagaataatattgttaagtagttacttactgcgccaccaggcattttgaatgggtgaccttccacttcttctgggtgtaattttctaaaacgtaagtgactgaataaaatcataaaccaaggaatcatacctggtaaaatagacgcactatatacgtatacgaaaatactcttcgctccatcgatatataaaggtaaaattacatttaataaagcaccaattaaaataccaagagatactgcaacaacagtgtacaatggcacaccatttctcatgattttagtaaatattttcggcatttcacctttatgagcaagtgtataaatcatacgactcgcactgaaaatacctgagttacatcctgacattgctgcagttaatacaacaaagttaattaatccagctgcaaatgtaataccgattttagcaaatgttgcaacaaacggacttccaatgtctcctaattgattccaaggatacacagaaacaataacaaaaatagcacctaaatagaaaattaaaattctccagattacaccattcactgctttaacgatatttttctgaggatctttagtttcacctgcagtaatacctatcagttccacaccttggtatgaaccaattacaattgataatgcaaagaagaagccaacaataccatttggcataaatccgccatttgtccataaattagaaatacctaccgcatggccaccatttccaaaaccaaagaaaataagaccaaaaccagcaataatcattaaaataattgttacaactttaattaaagcaaaccaaaattcaaattctccaaacgcttttaccgagaataaattcgctgccattaataataaaatagcaataacaccaggaatccaagttggcaattccgggaaccaaaacttcatatattctcctactgcgatgacctcactcataccaacaacaatccattggaatatattactccatgctgtcatataacctgctgcaggatgtatataatcacttgcaaatgttgcaaatgatcctgttgtagggtttaaataaatcatttcccccattgctctcatgattaaaaataaaaagatacccgcaattaaatatgcaaggataactgatgggcctgtccatttaattgtacttgtggcacccatgaaaagccccacgccaatcgtaccaccaagtgcaatcatttgaatttgacgggcactcaatcccctttgtagttcattgttctccataacttcttaccccatctctgattgatactaaataaatccataaaaaaacttattgccgtaattatactataaattatcgattttggtacattaatatttgcataccatgcaatcgtttacagaactactatagcaggcttttgcaactttgcaaacaattattttgtgatttttctaaaaaattaaaaaagttgtccatgaaccgttgcgtcacatacaacttcagctattctcggtaattatgatataattttaataatattaaaaaggagtatatcaatgttaaaacaaatactgccacgtgctacaaaaatatcggtaatctttgctgtagcatttttcatcataaattatatcggtatggaaaaacctgacatcctatatttagttggaagaactattattgcaacacttgctttcatactcatttgtcttacagtattttctattattaattctccagagcgcaagattaaactcggtacgactttaccgattgcattaattattggtatcattttcggcgccatatttttaacggtacaaatcggtgtcatcactgggttaatcatcggtgtgattgctacgtttatttgggaattgattgaaaaaaataaaggaggtcgttcatcatgacaacagcattaattggtgtaattgtattaatcttactaattattagctttgtgccaaactaccgtgctatgaaatcagcaaaagaacaaggaagtaatgcaacaagagctacaattatggtaggcatagatattatcttaattgtacttatcatcgtgacgttattattaaaatatatgtaactatttaaaccaccctatctcatacataaacatgaacgttctaccatttcacatacatatggtcgtccatttaatgaggtaaggtggttttctcgttaaagtttaccttgtaatagtaaaaaatagccaattattgcgagtattaagtaaatcattgaaccaacaacaaaagatcttacttgcacgcgaaatggtgtctgtttgttaaatataggaccaatcaccaaatttccaacgcctaaaattactggaccagctagaaaaaacaatataatgtaacccatcatgatacgcctcctatttcgtaaagaaacgcgctacaatttgatcgtaatcaatatcttttgctacataatctacattagaaaagtcctgtgcgcttgtcattttattcgtattaacaataacatctaatccagctgcaatcgcggctgttgcaccatttacagaatcttcaatagccaaacattgtgtaggcatataatttaattgttgtactgcagataaatataattcagggtcaggtttaacttgttcaacatcttctctaccaacaactacctctatatactcgtctagacctaatgctttaaaggtaggcattatttccgctttcacactacttgtggcaatcgccataggaatgtgacgttgctttaaaaatgccatcaatgatttaatcgtatcaatcatcggtaatgttgtactagtaagatgatgttcttcataaagtttatctttattttccgaaccaatcgctttaattaaatggtcatgcaaatctgtagctgctcctccaatagaagaacgataaaaatcaatgcttataggatcggcattatgcatctctaaatgtttattaataacattaaataaatgttgttccgtatctattattgttccatcgaaatcaaatataactgctctatacatatatttactcctctattttttctctttatcaaagcttaacacagtccgatgaccacttcattctattagtgcaattataacttttttgaccaatactttgctaaaataggccctgttatattatgaatgaaactaaacactgcgcctggtactgctgcaattggattaaaatgcaatgctgctaatgacacagctaaaccagagttctgcattccaacttcaatactgactgctttttgatcttgtcgatctaattttaaaagacgagctaaccaatatccaatcgtataccctaatacgttatgtaacataactactaaaaatattaacaatcctgtagttaagatttggtgcttactgccacctacaactattgctaaaattaatgaaatagcaacaactgatataatcggcaaagctgtagaagctttttcagcaattttacgattaataatttgcaaaacaatacctaaagcaattggaattaatacaacttgaacaactgaccacaacatactcaggaaagatacttccaaccattcatttgcaaatagatatattaacgcaggtgtaacgaatggcgctagcaacgtagagaccgtcgtaatagaaacagaaagcgctacgttagctttggctaaataactcattacattacttgatgtcccacccggacaacatccaactaatattacgccaacagcaatatcaggtggtaaatgaaaagactttgcaattataaatgctaatgtgggaataatactgaattgtaggcagacaccaataattactgctctaggtgctttaaagaccattttgaaatcattaggtgtaattgttaatcccatacctaacataacaataccaagtaaataaggtacccacttacctaatgtcgcaacatgttgtgggaaaataaatccaataacagctgctactaacatccataccaaaaaactcttcgtggcaaatatactcaatttttgaaacattgttaacacatcctcgtcgataatattgaaaaatattaccataagaccagtaaggttacaattacttttctgaaaattgagattatttagccattctctttttattgcaaatattttatcactgataaacaattattttaaacttcattcaaaagtcttagtgaataaagaaaaaaagcgtggtaaaatcaacttgaacaaaattaagtcacctttataaatattaaacgtgtatttaatgccatgtattcctcgggaggtcctcacatgttaattgataaattcgaaacatacatcatcaacatcgccggtttaaatgaccgtactactagaaaaaaattaagtaagttatgcaaaagtgtacaattttgtgatgcgttgcaattctcaataaacaaacagtttaatcagtatgtattagaaattagcttaccaaagcaacaacttccatacttcatttcatttttaagttttcatcagtatagtattttccaagtactttcaccaaagaaaataaatgaattacttgattctgataatttatatcaatctgcaaagcgtttcgatatcaatattgatggcttgcaagatgctttcattaaagacaaagtcatcgatattatgaatatgttccaaaatcacactgatatcacttatacgttgaataagtctcatgcgcatattatatgtacgccagaaatattcgctaaattgttacatacgattgcaactagaaatatcgacattctatctgccaattatagatcgtcatctatgagcaaagctcgtatatcataataaaagacacatctatacgatgatcatttacaatgattgcgtatagtgatgtgtctttttttgtattatttatcttcggacgattgatcctcaaccatttgttcaaatgcttcacgaacttgtggtactgtcatacctactacaacttggatactcttaccactctttactaatccgtgtgccatttgttgatgcgtgaaatattccgtatcctcaactttactttcatcataaacagttaagcgtaatcttgttgtacagttagtaacatctttgatattttctttgccgcctaaaccgtctaggtaatacgcagctttgtcttcgtattcattaccagttgaagcacgtttagggtcaacgttatcaccttttttatttttatagtcttgtttagagaataacttaacctcttcttctgttttcttacgtccaggtaatggaatatcaaatttcaaaattaagaatctgaataagaagaagtaaatcgctacaaatattaagcctataacaacttgtgctacataagtgccccaatgttctttcccaagtggtaaccagtttgttgaaataaagtctaacaaaccaccacccatgttacctacaacaccaaatgcgtacattaaagtatccattgatgctgctaaaactgcatgtaaaacaaataagtatggcgcgatgaataagaatgtaaattctaatggctcagtaatacctacaacgactgctgttaatgtggcaggaataagtagtgccgccacctttttacgattttctttaggtgtcgtagcatacattgctaaggcaatacctaaacatccaaatactttcccatttccttgaagcataaagccataagggaattgctcttttaatggcttactactcttagcaaactcatttaaatgttgtaaccattcagctttcaagccgtgattgactactactggtccaacttcaattggcgcataaataaagtgatgtaatcctgttggtattaatacacgttctaagaagtgatacaaccatacaccgatatagcctgaagcaatgataaagtgttgcattgagccaataccgtgctgaacagttggccaaataacacaagtaattgctgctaatggtaacatcacaaaaaatgagattgtaactacaaatgttaaaccttggaatactccaaccatttctggtaatcgtttactatagtatctattgtgaatccaagtaataatagctgaaataataataccacctagaatattcgtatccaatgtggcaatacctgcaattgattttaaaccaggtacattttcaacgcctttttctaaattagcgccaaacgtatgtggccattgagttaaaatggcatttataaatgtattaaacattaagtaacccatcaatgctgcaagtgctgcatgacctggtgcttttttagctaaagaaagtggtaaacctacaacaaatacaacttccatatgcgtaaaaataacccagccaccagattctattactgaccaaaatttaaaccaaaacgtatgttgatctgctaaactccccatgattgtaggatttttaaataatgtcgcaaagccaagcactatcccaaagaaagcgaacattaatactggtacaatcattgcactaccgaaacgctttatcgcattcatcttctattccctccatatcatctttcctaacaatacatctaattagattcatttataaatagatgccttactatttaaatataatatatagtaaacgcttacacacctacaacgacattgacgtattttgaaagtattttgtataatcagattatcttttcatatagtgaaaattttttcacaagcatgtcgagaatatgctcgattttaaaatatgtaagtactatagccatgtataaccttatatacaatcaaaaaattaatttctaaaatttcaccttttaatgtaaaaaccatatatcacaaatttattttccaaggaggttgaatatgtttttagacgaacacattaatagaaactttgacaaactaaatgataatgatttacatatcgcccacttcatcaacacacacgttgatgaatgtaaaaatatgaagatacaagatttagcgcaattcacacatgcctcgaatgcaaccattcatcgattcacacgtaaattaggttttgatggttatagtgattttaaatcgtaccttaaatttgaaagtaataagacacaccaattaccatctaactctatcgatagtttcaagcaagaaatcgatagtacattcagttatttagaacgcgttgattaccagcttcttactgaaaaaatgcatacagcttcaacaatatatttgtatggtacagggcgtgcacagttaaacgttgcttcagaggcacagcgtatattattaacgttacataatcatgtcattgtacttcatgatgaacatgaacttaaaatgattttgaacaagagtgaacctaatgatttattctttattatttcattatcaggtgaaacacatgaattattagaagtaacaaacttgcttcaacttagacaaaaatactttatttctgttactacaatgaaagataatacccttgctcaaaaagcaaattacaacgtctatgtatccagtaacacattctacttaactgatggtacagactattctagcttcatcagttatcatatattctttgaaacacttgtaagaaaatataatgagtatttactacataatgatatttcaaattagtaaaaaggaagttatgatttaatggccttgagcctatcataacttccttttatcattttattgttgtgttgatgtttcgataacgtggtacattttatcaaacatcaattcgaaaccatgcaccatggaatcatgatattcttttttcttttgcttgtattctaaattagtaaatcgtctttccttttcaactaatgaacgataataaaatagcatttgggtgccacctgtttcacgttcaaaaaattctacctcaatgacatcttgtgtttcacttagtccaggcataccgatagtcatcttaacgtattcatccataactaaagattcataaataccttcaatcacatttactttgccattacgttgttgatctacaatacgataattaccgccttctttaacatccgcttcaatctctttattcgttctggctgatgtcataaaccattgttttaacaaatctttctttgtccaagcttcgtatactaactctggagaaaatttataaagcttttcaatttcaacttcgacatgttcattctctacattaaattttgccactgttgtccacccactttcgctcttacttttattttaacgtatttttgctcagttccaaacatagatgatcatcatttttaaaagattagcgttatacggtgagtacaacatgatctgttaatataacaagccaccttacttggctacatcgatatattgttaagcattactatttcatttcttgactagtgttcttttttagctttggaaaattaaataaaatcgcaacaagtccgcatacacctaataatataggataaatgctatatgggaataacattaacggtgaaataccagctacaccagccgctgaaatgacttgcgggctatatggtaataaaccttggaagcagcctccaaatatatcaagaatacttgctgatttccttgaatctacatcatattcatctgcaatatttttagctaaaggacctgacataataatagagatggtgttgtttgccgtggcaatatctgcgacacttaccaaactcgcaattcctaattctgcgccacgctttgatttcactttagagcgaacaaattgcaacaaccattcaataccaccattgtgttgaataataccgactaaaccaccaattagcaatgcaatcatagcaatatcttccatgcttataatacctttggacactgcatctagtagccccatccaactgaatgaaccatctatgagaccaatgattccggctaataatgttccgccaatcaatacgataatgacatttacacctaataatgctaataccaatactaaaatatacggtacaactttaattaaattataatcatagtttttagcatgatttaaagaaatgccattcgttaagaaataaagaataataatcgttaaaatagcacctggcaatacaattttaaagtttactctgaatttatctttcattttcgtatgttgtgttctaaccgcagcaattgttgtatctgaaatcattgatagattatcgccgaacattgcacctccaacaactgtagccattgctagcgcagttggtacatctgtcgcttgtgcaaatccgtaaccaacaggtgctattgcagcaacagtccctactgacgttcccatagatatagaaacaaacatacaaatcacaaacaatcctacaataattaaattttctgggattaatgatagtcctaaattaactgtcgactttacgccacccattttttcagctgtatttgaaaatgcacctgctaaaataaaaatcaacatcattaaaataatgtttgaatggcctgcacctttcgtgaaaacctcaacttttttagcaaatgattcttttcgattcattaataacgccacaattaccgttatcgtaattgcaacatttaatggcattgaagtaaaatcacccgtgataatacctacgcctaaaaacaacgccacaaataataacaaggggaataatgcccaagcattgctctttttatgtacttccatcctttttacctgctttccaattaaaaatacctctttctcacaaacgatgaagaaagaggttttcatgtactttacctgcttatcttcaaaccattacggttactggaattggcacattcgagatgttgccgaggcttcatagggccagtccctccacctctctagataagtgatgcttatttacgtttacgttacaagataatccttagtacgtcaatcataaattaattaggagtcgtataatatttttcataaacaatcattgctactgtaataataatcaaaacaataatgctaatcgcaagtataagccaccatttaagcattaatgcaataaaaatgaacacgatagacacacttactaatattaatgatatgactttaaattgctgtgcactttgttcagaaataactttcaactgtttgtttgatggacgcgtatttcttatactgattcccagtatattttctaatatttgaaccaatacgatacttattgcaaatataataattggtaaaacatcatagctccctatagttaatgtataaattacaaatccaatgtaaagtaaccctgagagcacacccaaaaagtaagcaacatgtttgtcaaacttaatgatatgttttttaacgttttgatgtgtaagccatacattcgaaacaatcgcaaccacaacaaacagtgtgaataatatataaactggcaacttttgttcaggaaaaacagtcgctattcctaaagctaatgctaaaatcaaaaataaaatagctctagatactattaatgccataataacaacccctttgtttaatatcgagtttgcaaatttacgtttatcagcatttctatgatcagtacttctacggtcagcgtttctatgtaatttacatcatcttaacatataaatacttcgctatttaattgaaaacatatcctattattctttgtccgttctgacgtctaatatctaaccttaggcattacacttggtaataaatttaactttcttccactaaccgccactaaacccaatcccgcaatagtttttaactttttcgttgttgtcctgacatcctcattaagaaagtttattctgcttaaaacttataatccacaccctgagcaaacgctccttatgacaaagtattaaaataagccgataaagatacacacctttaccgactatttaaaatacacttcaccaattcattttaatttacttgattgaagtagctaaattaatattatgttgttcaattaaaagcttcatacaaacctaatctatttgcactccaccgctaacaccgaacacttgtccagttgtataacttgattcttctgacgctaatagcacataagttccacataactcaacaggttgacctgcacgacctaaaggtgttttttgaccaaatgttgggattttactttgaggttgtccaccagaaatttgtaatggtgaccagaatggaccaggcgctacacagttcactctaattccttttggtcctaattcttctgaaaaacttttagttaatgaaataattgctgcttttgaagcggcataatcatgaagaataggactaggattataaccttgtacagacgatgtcgtcgtaattgacgcacccggttttaaatattccaaagctttttgaactgtccaaaatagcggatagacattcgtttcaaatgtttcagtaaatgcctcagttgtaaatccatgaatatcatcatgatactgttgatgtccagcaactaaagtaacattatctaagccacctaattgttgatatgcttgttcaacaaggtcatagttgaactgctcatctcttatatcaccaggaattaacactgccttttgaccactttcttcaatcacttggcgtacttcttgtgcatcttgttcttcactcggaagatagttaatcgctacatctgcaccttctttagcatacgcaattgctgctgcacgccctattgctgagtcaccacctgtaactaacattttatagccttgtaagcgttgattaccttggtaagacgtttcgccacaatcaggtgctggcgtcatttcagattgtaaacccggtacctcttgctcttgtttttcataatccgtggttttaaattttgttctaggatcttgagctgccatttttaaacatctccttattcgcttaatggttattatttacccaatcttcctaggaacttaatcatgattacactaaaaattactttcttctttataaaaacaagctcgaattactcatgcaatagtctctttacaaattcaacaaaatactcaggtactttttctagaatcctttcatccggtttatattgagggtgatgtaaatcatattcactatgagaaccaattaacgcaaatacacttggaaaatgttgactataacctgaaaaatcttctccaatcgtaagcggctgttccatcatttccaccttatatccaacatgttgggctactgctattgctttatgcgtcaatgcctcatcattcatcacagcgccaggtaaatgtgtataatttaaattaattttcatattatatgcttgagctaacccgtccgcaatatcttgtaatcgtgtttctacaagctttcgcaccacaggatcaaaactacgcactgtgccttgtacatacgcatgatcagcaatgacattccaagtattaccacatgatatttgtccaattgttactaccgcttcatcaaacgcagatagatttctactaactatggattgaatactattaatcaattgcgccaacacaataactggatcgttgcattgttctggctttgcagcatgaccacccacgcctttaatatgaaactcaaaacgatctactgctgatgtaattgcccctgttttgattgcaaatgtacctaccggacgcgatgggtcattatgaaaacccaatactgcttgtacatcttgtaatgcatgtgtttcaataattttaaaagcgccatgtcctagttcttctgctggttgaaaaatgaatttaacacgcccagtaagagtgccctcaatttcttttaactttacagctgtagccaaaatactagccatgtgaatatcatgaccacacgcatgcatcacaccttcattttcagatttaaaatcctgttcaacaagctcttgaattggtaaagcatcaatgtcagcccgaacagctatacaactcagaccttgccccacttcagcaacaagtccagtcgcaagtggtaagtctaatattctaatattatattctgttaaaatatctttaattttttgtgtagtcttaaattctttatcggatagttctggaaattgatgaaaataccttctccaggcaacagcttgatcttttaatcccatcggtcattccccttccttaagtcaatgatatgttgtctaccctacgatgatcgtctttaactattaaacgatgatttcacaacaatgtactcttgttaattactttcgctaatgatagacagttgtttaataatatcgtaacattattgtcaaactattctaacttttataattaagaacctatacaaaaacgtgttctcagataaacttgttttacaaaccacaaaaagctctaaacattagtgtaaaccaatgcttagagcttttaattactttatactttaaaagataatgtgttatctacgatgaccttaccgtctttaataactttttctgcgtgattgataccaaaatgataaggaatatattcatgatttggtgcatcccaaattactaaattagccttatcacctgtgttaattgtacccgcgttaatgtctattgctttagcagcattgaccgtaacagcattccaaacttcattaggcgatagctttaatttcaacgctgcaatcgccataacaagctgtatgttgtttgtgacactacttcccggattataatcagttgctaatgcaatcgcaccgttattgtcaagcatgcctcttgcatctgcataatcttctttacctaaatagaacgtcgttgcaggtaagaggacagctacagtatcactatttcgcaacttttcttttcctttgtcactagacgctactaagtggtcagctgatattgcttgttcgtcaattgctaattccagtccgcctaatggatcaatttcatccgcatgtattttcactttaaaacctgcttctttggctttttgcatataatgttgcgattgctctattgtaaatacacctgtttcacagaatatatccgcaaagtctgcataatgttttacttccggaagtaacgcaatcatttcttctaaaaatgcctcatttgaacttgcctctttaggtacagcatgaggccctaggaaagtatgtttcatatctaaatcatatttctcagctaaacgattagacactttcaattgcttcagttcattttctctatctaatccataaccactcttactttcaactgcaagcacgccgtgtttaatcatagtaagcaaatcatgctctgcttttttaaacaagtcatcttcggatgtttctctagtagcattaacggtagataatatgccaccacccatttctaatatttcaaggtaagacttaccttgacgttttaatgacatctcatgttctcgagatccaccaaatgttaaatgggtatgagcatctactaatgctggggacactaccttcccactagcatcaattgtcccagtcgcatcgtagtcatctgtatgtgttccagcatatacaattttgccatctttaatgacaactgtaccatttttcacaacatttaattcatctaattccttacccttcaaaggtttatctgttgatctcggtaaaattaattctgctatatgattaattattaaatcattcattacttatcacctgctttatcaatcattggaatatgaatacctttttctttagctgtttgaatagcaatgtcatagccagcatcaacatgtcgtgcaacacccatacctggatcagtcgtcaatacgcgttccaatcttctttcagcacgctctgatccatctgctacgacaaccatacccgcatgaagtgaatatcccatgccaacaccgccaccatgatggaatgaaatccatgaaccacctgcagccgtgttaatgagtgcattcaatacagcccaatcaccaaccgcgtcactaccatctttcatactttctgtttcacggttaggactcgcaactgaaccagcatctaaatggtctcgtccaataacaattggtgctgaaatttcaccgtcacgtacaagacgatttaaagctaagcccatttttgctctttctccatagcctaaccaagcaatacgtgatggtagtccttgatatgaaattttttcttcagctaaatcaagccatcttaataacttttcattttctgggaaaagtttacgcatttcttcatccgcacgctcgatatcttttggatcaccactcaatgcagcaaagcggaatggccccttaccttcacagaataatggtctaatgtaagctggtacaaagcctgggaagtcaaaagcatttctcactccgttattgaaggctacttgacgaatattgttaccataatcaaatgctacagctccacgtttatggaattcaagcattaattcaacatgctttgccattgaagcttgtgacagttcaacatattttttcggatctttttcacgcaatactttcgcttcttctacggagtatccttgtggcacatatccatttagcggatcatgtgcacttgtttggtcagtaataatgtcaattttaaatcctttttctagaatcgcttgatggaggtctacagcatttccaactaacccgattgacaatccttctccacgttctttcgcttcttctgctaattttaatgcttcatctaaattagctgttttaatatcacaatatttcgtagcaattcgcttatcaacacgtgtttcatcaacatccacacaaattgctaccccatgattcatagtaattgctaacggttgcgcaccacccataccacctaaacctgctgtcagtgtaacagtgcctgctaaatctccattaaagtgttgattacctagctcagcaaatgtctcataagtaccttgcacaataccttgagaaccaatatatatccaactaccggctgtcatctgtccatacatgattaaaccttttttatctaattcattaaaatgatcccagtttgcccattcaggcactaatactgaatttgaaattaatacacgtggcgcttcttcatgtgttttaaatacagcaactggctttcctgattgtactaacattgtctcatctgattctaattcgcgtaacgttttctctattgcttcaaaagcttcccaattacgagctgcttttccaataccaccataaacaactaaatcttctggtctttcagcaacttctgtgtctaaattgttgtataacattctaagtactgcttcttgttcccaacctttacactcaatactaaaacctttttttgcttgaatttttctcataaaattcgctcctgttctttttagaagttaattccactaaatttaaaacgcttacattattatcttcaatattcattatagtatgttaaaatatagccaacaaatataaataaactaattatccatagcttgaatctataaataaaaggagcaaaaaacatgaaaattattcagttagaatacttcttggctatcgtgaaatataatagttttactaaagctgcacaatttttacatattagccagccatctttaactgctacgattaaaaaaatggaagcagatttaggttatgacttatttacacgttcaacaaaagacatcaagattaccgaaaaaggaatacagttttatcgttatgcgagcgaattagttcaacaatatcgatccacgatggaaaaaatgtatgatttaagcgttacatcagaaccaaggataaaaattgggactcttgaatctacgaatcaatggattgcgaatttaattcgaaaacaccattccgactaccctgaacagcaatatcgtttatatgaaatacatgacaaacatcaatctatagagcaattactgaattttaatattcatttagctataacaaatgaaaaaataacccacgaagatataagatccattcctttatatgaggaatcttacattttattagcacctaaagaaacatttaaaaatcaaaattgggtagatgttgaaaatttgccactcatattgccaaacaaaaattctcaagtgcgcaaacacttagatgactattttaatagaagaaatattcgtccaaatgtcgttgtagaaacagatcgattcgaatcagcagttggatttgttcatcttggcttaggttacgctatcattccgagattttattaccaatcatttcacacgtccaatttagaatataaaaaaattcgtccaaacttatgccgaaaaatttatatcaattatcataaaaagcgtaaacactccgaacaagtacatacattcgtacaacaatgccaagattatttatatggacttttagaggctctttaacttaagttattagagcctcttatgcagttgctcagtcaactgtataccttttgcctttaacttaagttattagagcctcttatgcagttgctcagtcaactgtataccttttgcctttaacttaagttattagagcctcttatgcagctgctcagtcaactgtataccttttgcctttaacttaagttattagagcctcttatgcagttgctcagtcaactgtataaaaattaatgacgtcatttcaaaaatcgatacaaaaataatttattataaaaattctaagaaagaagtgaacccgatgttaaaatctattaatcatatatgcttttcagtcagaaatttaaacgattcaatacatttttatagagatattttacttggaaaattgctattgactggtaaaaaaactgcttattttaagcttgcaggcctatggattgctttaaatgaagaaaaagatataccacgtaatgaaatccacttttcatatacacatatagctttcactatagatgacagcgaatttaaatattggcatcagaggttaaaagataataacgtgaatatcttagaaggaagagttagagatattagagatagacaatcaatttactttactgaccctgatggtcataagctagaattacatactggcacacttgagaacagattaaattattataaagaggctaaaccacatatgacattttacaaataaggcgtcattataaaaaggcctcttgaactccgttaaaattttaattaattattatataataagagaacttttcaaacaatacagttgttatttttactatctcaacaaacataaataagcagtaagatgactacaacttaagagtcttcttactgcaattatctttcaaatatatcaacgttaatataacttctattacgaaatactcacattctgccctgcaatgcaaatttcgtcacatataaatatttttaattattttaaaaaatgatgcactaaattagcaacgagcttcgcagttctattgtcagcgtcatatgttggattcatctcagcaatactaactgaagacaccttatcacttggaataatacgttttgccaattcaagaacagtatgtggatacaaacctaacactgccggcgcacttaccccaggcgcaaatgcactatcaatgacatccatacaaatcgtaaacataatgacatcatgttcatgtataaaacgctcaatcatatctttgattgttggtgatacgtgactcaataattcatctgcaaagacataatcaatctttttctctttagcataatcaaataaactttgcgtattcccaccttgagcaataccaagcactaaataacctgtgttttcatcttcttctaaaatttgtctaaagctcgttccagatgtagattgttgttcagcacgtgtatcaaaatgcgcatcaatatttatcacaccaatagattgtgttggatagactttacgcgttgctaaatattgagcatacgcaatatcatgtccaccacctaataaaaacgtttgtctatgattaacaattgacttcgctgcaagtgttgcaaattctttttgagtatcaattaattcctcatgatcatgataaacatttccgtaatcgactaaagtttcacattgattcaaatccggcaaacctgcaaatgcttgtttaatcgcatctggtccttcttttgcaccaatgcgccccttgtttaaagcaacacctttgtcaacagcatagcctaatataccaacccctgatggtgtactacttttttccaatttcgacaaatcttcaaatgtcactgtttgaaaatgcctgaattttttcgggtctgtttcactatctaaccttccagtccataaatttggttcaccttgcttgtacacagcatttccccctcttatttatgtggctttttaacaattaaagtataacgtactacaaattttgaattcaattcataattaaaaagtacttatctatataccttttacccctattttctattcactaacgaacacgaaagcgatttatgttaataaaatacgtcaagactattacattttcattaatattagcacagacaatttaactcacggcttgtaatatgtataattgttacaaaatgatattttgcttgttacctaatggaggttacatataatgaaaaacaataaaatttctggttttcaatgggcaatgacgatcttcgtctttttcgttattacaatggcgttatccattatgcttagagatttccagtctgtcattggtgtcaaacactttatatttgaagttacagatctagcaccattaattgctgcaatcatttgtatactcgttttcaaatataaaaagatccaacttgcaggtttaaaattctcaatcagcctgaaagtaattgaacgtctactgctagctttaattttacctttaattattctaattattggtatgtacagctttaatacatttgcagatagctttattttattacaatcaacaggcttatcagtacctattacacatattctgattggacatattctaatggcgttcgtagtagaattcggattccgttcatacttacaaaatattgttgaaacgaaaatgaatacgttctttgcaagcatagttgttggtttaatgtactctgtattttcagcaaatacaacttacgatacagaatttgcagcttataatttcctttacacattctcattctcaatgattctaggtgagttaattagagctacaaaaggacgtacgatctacatcgcaacaacatttcatgcttcaatgacatttggccttattttcttatttagcgaagaaatcggtgatttattttcaattaaggtcattgctatttcaacagcaattgtagcggttggctatattggtttaagcttaattattcgaggtattgcttatttaacaactagacgaaaccttgaagaacttgagcctaataattatttagaccatgtcaatgacgatgaagaaactaatcatactgaggctgaaaaatcttcttcaaatattaaagatgctgaaaaaacaggtgtagctactgcatcaacggtcggtattgctaaaaatgatactgaaaatactgtggctgacgaaccaagcattcatgaaggtactgaaaaaacagaatctcaacatcacatagataatcaaactgaatctaatcatgatgaagatcatgacatcacttcgaagtcagcagaatcagcagaatcagttaaacatgcaccacaaagtgacgatttaacaaacgattcaaatgaagatgaaacagagcaatcattaaaagaacctgcgacctataaagaagacagacgttcatcagttgtaatcgatgcagaaaaacatatcgaaaaaactgaagaacaatcttcagataaaaacaaataataacaaagcgcttgctagtacctcttaaaaagatgatgctagcaagcgcttttctatactatatattatttttctaaaattttaacgccctcttgagtacctacaataacttgatctgccatatctaagaagtagcctgtctcaaacacacctgtcagatgaattaaatactcatggaacttatatgggtcaattccttttggtaacttacaatctaaaatataattgccattatcagttataaatgcgacatcttcgtttacacggcgttctacttttatatcagcgtatgattcaattttacgtaatatgtgataccagttaaatttatccacctctactggtaacttaaacgtctcacctaagtattgaaccattttcgtttcatcgacaaccacaacaaaacgtgatgccatttcatctatcactttctctctgaacagcgcaccaccaccacctttaattatatttaaagatggatctacttcatcagcaccatcaattgctaagtcgatatgatcaacatcattgatttcgcatattttaatacctagttcttttgctaaaaatgcaattttattagaagtgcatacacctgtaatattgtaaccacgttctttaattagttgcgccatttgaggtaagagtaattccattgtacttcctgtaccaattcccagcgtcatgtcaccattgatttgacttaaaacatcatttaatgtcattaacttgagtgctttgacatctttcatgaaggtagcctcccatatttatgtaatctattcaattcatattttacatgactcgtataaattaacatacccttatttctaacatttttttaaacatatcaatcagaatttacaattctaaaaattttttatagtacaatatactttaacttaacgttaaggagaatgatatgatatcaattcacgcaatttcgacaggaaaaatccaagatttgccttatagctcgaaaagaccgatgcgctctgctttagataaaactaagatttcacaaacaacatggttatcttcaactggtttcactggtgatgaacaggcttataaagatcatggtgggccacataaagcagtttgtgggtttagtaaacataactatgcactgtatcaagatgatttaccttcactacctactcatgcgatgtttggagagaatttaacatttgattatttagacgaatctgatgtttactttggtaatcaatatcgtttaggtgaagcgttaattgaggtttctgaaattagagaaccatgctggaaaattcaagcaaaatataatattcctgatttagtgaagcgcatgtctacatctggtaaaacaggtttctatttccgggtattaaaacaaggctatgtatctccaaatgatcagctttacttaatacaagaagcaccaatcgaacatcgtttatctgtacaacagcttaatgacctttattataatgatagacaaaatcaagatatgttacgatatgcactaaacaatccatttctgtcaccaacaagacgcgataaacttcaaaaaatgtataacagaacattgaaataattacctttcattataaatgttaaatgaacttttcaaaacaaaaaggaatcaacttacacatcgtttgtataatagtcttatctataactactgatgctattgattccttttttatgttatatattttctttatttcaaactgtatattaatgatgtcacttcatttgatacgattcttgataacctattcaaaattccgccaaataacataaatattatataaatgccgatacttttaatcattttctactttttcttcgatacggaaacttgttttcgaattgaacacttcaccagcttttaaaattgacggtgctttttcaccatataaattaatatcatttggtaaaaattgtgtttctaatgtaaagccagaatgtggtttataaatattaaatggactatcccactcatcaggctgattaaaagtaaagaatacaacatgaggcatatctgtatcgacctctaacataaattcatgattttcaacatacattttatgttcaccaactgtaaatgggtgatctagaccaccaaaacgtgtcatttgttggcttaattgcgcatgttgtgatgtaaaaatatcactcaattttatcttgttatcttcaaacacttcatgtaaatctagaatatcacctgtaacaatatttcgctcatctaatacatacatatctaattgattacttgaaatgcgatgattatcaacgacattattatctcgattcaaattgaagtacacatgattcgtaggactaaacaatgtgtcttctgatgcaactgcttcgtattcaatcgaccattggtgatccgcatcataaatatgtgtaatcgtcacatcgatatcacctgggaaatgatcatcagctgatttcaacaccgttttaaatatcactttaatttgagcaatttcatttctaatttcataatcaaataacttattgtccaaaccatgacatccaccatgtaaatgatgttcgccgttgtttttttctaactgatattctttaccttgcaacttaaatttagcattatcaattctaccgctatatcttcctatagaagcaccaaatttaaaaggattactatgataaaattcatccgcttcaacaacatttccaagaacaatattattatcatgatatttccaagacactactcttgctccataattcgtaaaaataattttagtttcatcattatcaattttgattaaatctacaccttgtctttggtgctcaacttcaactatcatttttacttctcccttctaaccacaagtgttcaagctctgctgggcagcaacattactaaaacacctacaatacaaatgattgcaccgataacatcatatttatctggcatttgtttatctacgaccatcgcaaaaatcaaactcatgatgataaatacgccaccatatgctgcatatactcttccgaatgatggaaatgattgaaatgtcgcaatgacaccatataacatgagtatcacaccgcctattagcccaacaagtgaagactgtccttccctaagccacagccaaatcaggtatcccccacctatttcacataagccagctaatataaatataaaaatcggatataacatgaaatcactccatcacacatttgctaccaataatctatcggctacatatcatttgtttacatttcttcttacttcacattcccattttaaaaagttcgttttcacattcatattgtacacttttttagacattattctatagctaaatataaaaaaataagagtaacacgctttcatcatcattttatatgataaatgtgtgtcactctcatcaattttattttttaaatacacgtttcattgaattaaataagccacgttcaaatgtaagtactgaatctttatatgttttaattgcaatccatatcaagacagctaccattacaattgagattaatgaacttaagatgacttcatgtaattgaagccctgaagtttgagcgcgtacaactaattgaaatggcgccaaaaacggaatataacttgtgattaaagcaagtcgcccatcaggattatttatcgtgaatatggcgatataaaatgcaatcataccaagtaatgtcagtggcatcaaagattgatttaaatcttctattctagatgttaatgatccgagaatggctgcaagtaatacatacgccataattccaacaatactacttataattccgacaataataatttgccaagacaattgattcatttccacgttaaaaccttgtagcaagtcttttaagtcaaaggcaaaaatgcatatgactgccatcaatacaattaaaataatctgagtcacggcaactgctataatgcctaaaattttagcaaaaatatgttggattggtgaaatacttgtaataatcatttcaatgacacgcgatgttttctcactagcaatttccatagctatttgagatgcataatttaaaacaataaagaacattagaaagataatgccataagctaaagcatagttaaaaatcttttgtccttctgatactttatcgacttcatcattagaaatcaccttattatcaactttactttgtgcttgtaatttttgtaagtcttctttgttgatatttaattccccggctaccatatttgtttgaatagctgtaagtagtgcttgtactttttgtgaatcttcatgacttactcgcttctcactaatgattgtcccttgcaacgtgcgattttgattcaccttgataatataagctttatcaagtttatgtttttttacttctttttcagcatcttctatagaaactttagtaaacttagcatcactatgaaatgtattcgcctgttgcttgaaaaccttatagatttgttcattcggtgctgctacaccaattttatctggaccatcatcaaacatgttaataatcttatcaatgttagataggccaatcattaaggcagcaatgataatcataaaaattacaaatgatttagctttaatttttttgatatatgtcaaagtaaatgtcgcccaaaacttatgcatccttgccaccaaccttctcaatgaatatatcttgtaatgatggttctacaacttggaatcgtttaacataaccttgatgtgctacaacttgataaatatctttggctacgtcttcattctcaatcgtcaactgaagaccttgcttcatgttttcactatgaatgatgcctctaatgtgtgttaaatctggtagtgttgtttctgactcaatgacaactttcttgttaccattagatgcacgtacatgattgatatcaccagaaacaacaagttgacctttatctaaaatacaaacatcatcacataattcttcaacatgttccatacggtgagaactataaacgattgtactgccccaatcatttaagtctttaactgcttcttttaataactcaacattaactgggtctagaccactgaaaggctcatctaatattagtaattctggtttatgtaacatacttgctaacagctgaattttttgttgattcccttttgatagactatcaattcgttttttacggttttcagtaatatcaaaacgctcaagccaatacgatatttgctgttgtatttctgtttttgacattccctttaaagttgccaaatatttcaattcttcttcaactgtcaatttcccatgtaaaccgcgttcttccggtaaataaccaatacgattgtacattgttttatctagttttttaccgttatacgtaatgtgtccttcagttggttcacttaagcctaaaatcatacgaaatgtcgttgttttacctgcaccatttcttcctagaaaacctaacattttgcctgattctaactctaatgacatatcatttactgccgtcatcttaccaaaacgtttcgtaacatgctcaattacaagtcccatcttttgcctcctaaaacaatatgtatttatcttaatataacatttctattctctataaatacaatatttttaaagtgaatttatttttaaaatttctgaaattgaaatatttaaatagtatcttctttgcatgttaagtatcatgagcgttagatatgcttttttccatgcctttattgccttattggtaaaaaaaatatcccagcaacaatctgctgagatatctatatcattacaattgattatctgtttcttccggtgttttcggtgtttcagatgtccccgcttttttcggtgtttcagatgtcactgattgatttttaattgaagatgggtattttgggctttcgccatatttatttgccggcttactgtcaaagcataggaatactatcataacaattgttaggcctaaataaacaaaataaagaagtactaacaaaatattaagacccatcggcattaaggtaaaatcactgtcataataactatcgataatctgtaatactatataaaatataatactgaatactgtcataatcattggaaataacattgttcttgatatatcgtgaaatcttcgaacgcacaacgctaaatttggaataaacgttgccaaactatagacaaaagtatacacagatgtaaggataatcatcaatatactcataactattaatgcttcgttatctgccgctatagaaataaagaatataaataggcttattattagcacacacacagctggaaccataagtattaaatgccacaacatcatataccaatattcactacgtcttgatctccccttaaaattaacataatttttccaaaataatacgaatgatttcataaaacctacttgaggtaattgttccattgtaatctccctttcgttaatcatatttatatttttaattattattaccgttataatttacaagattcattatcaagccacttcatttcaatcgtcattcactttggaaaatgaagtttatatttcatcactagttaaatgaaaacccgctacaagtacgcatctatatggagactcatttgaaagtcaatgcttcgttaactatactaaaaatatgtcacactgcaatgttcatgtttaaaagagtctcaatctctgcaaataaaatattccataacaaagtatatactttacatttttataattcttaacaatactattttatcaaacatttactacaataaaaatatctttttcatttttatttaaattaatcatataattgcgaggagaatattatggatttcgttaataatgatacaagacaaattgctaaaaacttattaggtgtcaaagtgatttatcaggataccactcaaacgtatacaggctacatcgtggaaacggaagcatacttaggtttgaatgatcgtgcggctcatggctatggtggtaaaataacacctaaagttacgtcattatataaacgtggtggtacaatttatgcacatgtcatgcatacgcatttactcattaattttgtaacaaaatctgaaggtatacctgaaggcgtacttatccgcgcaattgaaccagaagacggtttatccgctatgttccgtaacagaggtaagaaaggctacgaggtaacgaatggtccaggaaaatggactaaggcatttaacattccacgggctatcgatggcgctacgttaaatgactgtagattgtctattgatactaagaatcgtaaatatcctaaagatattattgctagtccacgaatcggtattccaaataaaggtgattggacacataaatctttacgttacacagtgaaaggtaatccatttgtgtctcgcatgcgtaaatcagattgtatgtttcccgaagatacttggaaataaatgtcatctttcattgattactatcatgaaaatgaaatctatctccttataagtcaatcaatcagccgtcaacatgcggatggggtgattgtttttctttgtgtccatcatattttttgattcatctcctctttttgaacttgttcttaattttaaaatataacaatagaattatttataattattaaatttagatgtattaatattattgatattattttcaaaaactagaaatattgatttattgcatgtataatgttaaaagtgcccttttataacgcttacatataaaagcttatttagggagagggatattcaacaagggggatttgaaaatgatagaacttaatgcaattacaacattatgtttagcctgtatactttacttacttggtaaagctatcgttaatcacgttaattttttaaaacgcatttgtataccagcaccagtgattggtggcttaatctttgctattttagttgcggctttggattcatttggcatggtcaagattaaattagatgcttcattcattcaagatttcttcatgttagcattctttacgacaatcggtcttggtgcatcattgaaattatttaaattaggtggcaaagtcttgctattatactttatgttttgtgctatcatttcagtcattcaaaacatagttggtgtatcactagcaaaagtattaaatattaaaccgttactaggattaacagctggttctatgtctatggaaggtggtcacggtaatgctgccgcttatggtaagacaatccaagatttaggcattgactcagcattgacagcagcacttgcggctgcaactttaggtcttgtatttggagggcttatcggcggaccagttgtaaaatttttaatcaaacgttataacttaaagcctcaacatagtgacgatacatttaaagattatagccaagttgcatataacgaacatttacatagtaaatttaatgccactgaagtattcttcattcaatttacaatcgttgtattctgtatggcagttggaagttatttcagtcatttatttacagctcaaacagggattaatgttccaatttacgttggctcattatttgtagcggttattgtccgaaatatctctgaaagttttaattttaatattgtagatttaaaaattactaatcaaattggcgatgtcgcattaggtattttcttatctcttgcgctaatgagcattcaattaatcgaaatttataaacttgctatacctcttattattatcgttttagttcaagttgtcgttatgattttatttgctgttttaattttatttagaggtttaggaaaagattatgatgctgcagtaatggtaggtggttttatcgggcatgggcttggtgcaacgccaaatgccatggcaaatttagatgttattactaaaaaatatggaaactcacctaaagcatatttagttgtacctattgttggtgcattcttaatcgatttaattggtgttatagtcattatgggattcattcaatggtttagttaaacaccaaactcataaataaaagaggaggccttcgcctcctcttttatttatcctcgatgtatattcaagctacgttgttctatccatgacaatatttccggactaaatacgatttgtttttgtgttaagtcgtcaatatttttagcatctaacatcgtcattattgatttcatgtgttcaataaatgattctacataagctactgtatgtgcaatgccattattttcaacttgatttaaaaacggacgtgacataccagttgcctttgcaccaagtgctaaacttttaattgcatcgagtggtgtacgtaaaccaccactcgcgaaaactgaaatttcgctttgataagccgttgtttcaagtaatgactcaactgtagactgtccccatgatgataagtaatccatatctttatttgcacgacgttcattttcaatatctacaaagttagtaccacctttgccactaacatcgacatacttaacgcctatttgttgtaagtcatgcattaattctttgctcataccaaatccaacttcttttataatgactggaacagatactcgtgatacaatcgacgctatattatctaaccaagtcacaaattcacgattcccttcaggcataactaattcttgaggagaattaacatggatttgtaacgcttgtgcctcaagtaattcaactgcttccaaagccttttctactggtacgtccgcaccaacattgctaaaaatcatgccttcaggattcatttttcgcgcaatcgtaaatgtctcagccatgcgtggatttctcaatgctgcatgtgttgatccaactgccatcgctaagccagtttctcttgcaactacagctagcttttcattgatgtttttcgtccactcgctaccacccgtcattgcattaatataaaccggatatgtcatcgttaagtcaggtgtctgtgatgtcaaatcgatatcatttacattaattgatgggatagaatgatgcacaaaacgcatcttatcaaaatctgaatgcattgcgtcagattgggccattgctatttcaacatgttcattttttctctgttctctttgaaaatcactcatgattaaacctaccttttcgtcatttctaatttaaaaccattttttacgtctgaaaaagatgattaatacgacagctataacaaacattacagctaagcaaatataatatccataatgtaaatgtaatgccggcatatttacaaagttcataccataaatcccagctatgaatgttaacggtgaaaatataactgatactaatgttaatacttgcataatactattcattctaaatgacgtgtatgactcaaaattttctcgtatttcatttgtcatttcttgtgcagtacgaatgatattacgttgcttaatcaagtggtcatcgatatgttgaatgtatagcgaatgtttattatctataatcaaatcaccattttgtttcattgtatcaattagctcctgcataggaaacagtacacgttttactttaatcaaatccgaacgtaacttaaagacactatccatgaccattttattaaagcgatcatctacatggcggtcttcaaaatgataaacactatcttcaagtgcatatacaaagttgaaatatttatcaaccatcatatctaaaattaatatgacgacatctgcacaatctaattctgcatctaatgtattcatatacttatagactactttatttaatgattccaacgtttgatgatgatatgttactaatacattgtcttgtataaaaatatttagtgctattggtgaatagtttgaccccataatactatggaatactaagtattgataatctttataagatttatatttagctcgtggcataccgttaattgcatcatccacttctaaatcattaaaactaaaatgtgctttaaaccattcattttcttgttcattcggttcatcaaaatcataccaaacaatagtcgcatcttttggtatctctttgatatcatcaactactttaaacggttcgtatgtagtttgataccgtatcgttaaagccatcgatactccccctaaataacgaattctctattattttatcatgaattaaataacgtgtatgtcttaatttattttagtatgatagtcactaaggagatggttattatcacacaactttttacacatactcaaaccgtaacatctgaattcatcgaccataacaatcatatgcatgatgcaaattataatatcatttttagtgacgtcgtgaatcgttttaattacagccacggtctttctttaaaagaacgagaaaatttagcatatacgctatttacactagaagaacatacgacatacctctcagaattgtctcttggcgatgtatttactgttactttatatatttatgattacgattataagcggttgcatttatttttaacattaactaaagaagatgggacactagcatcaacaaatgaagtaatgatgatgggaattaatcagcacacacgtcgttctgatgcttttcctgaatcattttcaacacaaatagcacactattataaaaatcaaccaactatcacttggcctgaacaattaggacataaaatagcaattccacacaaaggagcattaaaatgacagatgcattacaacaaaagattcatatcgaactactagatttattagatgatgttaagtttgaattaacagaattaaatgcacaaaaagggttatacattaacggaccagcaaatcagttacttaagcgtggcgtgcatatggcttatgttcaaggacaaaagcaagctatcgataatattatgactattgtggaacaacagcttgaagatcaacatttcctagaacattatgataaatttcaaaatgaggttgctcatcgcaattatgataaaacagctaactttgcagaacttagtgatattccacgtcaattcgataattttttagatcaattttatcaaattaaagggcaatactttatcatcacacatatcaatacacttattggtgattttcactcagaagctcattaacaattagtctatataatccttgctatattttcaaaaacaaaacccagttgcgttttcatgttaaatatcttctaccatgaaatcgtaactgggtcatttatatgttattagttgttttgtgttacatcctcatctatcgatttggcaatttgtttaatagctttatgtgattgtctaattggataaattggaaaatcatgtaccatcttaggataatcataaaactcaatgtattgatgatgttgcaacatcatttgttcgaacagcttcatatcaggatgtgtcatttcacgtccaccaccaaacatataaactggtggtaatccttctattgtgccattaattggtgatatgcgcttatctgttaatggtaggccattcgcccattttttcataatctcattgacaccaaactgacttagaaccgcatcttgttcgattaaagcatccgaaatatctttattagatagtgttgcatctaaaattggtgagattaaatacaatttattcggtaatggctgttgattgtctaaaagagattgtacaaaggataatgccagtgcaccacctgaaccatcacccatgactacgacattttgatggcctacttcagatactaattgatcataaacacgttgtatcgcttggaaagtgtcgtcaatatgaaactctggtgtctttggatagataggcagtacaacctcatataatgtacttaaagtgattttatccaacaatctccaatggaacggtgatggttgtagtgcattgaatccaccgtgaatatataaaattttcttatcaatttgatgtctgaaattaaagcgaaagacttgcatatcatccaatgataatttttctaaatttgctttaacatttaatgttgaaggctgcttatgtttttttctattttcaatttctcttttataaaaaaatctttcaacatcttgatcatttttaaacataatcgagcgattgtgaagcaaatatttattgacaacgctattcataacacggtttctaatcaatgtcttaacctacctttatatattttatgtatccaatgattgtctatcccctacattctttgccaaaaaaagtatataatgtagaagatattttctttttcactttcaaatttaagactacaattgaacagtgatttttcatcattataacagacaactagacatattgataagtaaagaaaagaactttatacggaggtgccttgtatgacaaatccaaatcaacgattagaaccatttgatgagacatttcaacaaccgaatattcatcgtggtaagcgatatggtaagaaaaaacgttcattggtaagcatgattattcaaatcattgtttttatattaaccgcaatcgctggatacagcatgtggaaacaacccatttttaatattgtcttcaccaaagaatctgtaaattttgatggcattaaaaattttaacgagacaattggaaaaatgcatcaattaaatattaatttgggtaatatcaatgatttacaacaaggaatcgatcgcttaattttagtctttaacggtttctttattttatgtatcgttagcctagtcataacaatactgacaattgtatttaatcgcacagttctaaaagtagtaaatattttagtgttaacaattatgttagtcattacattgtatttcagttatattattaaagcactcgcacaagaaattgcagatgctttaaaaaaatattatttaaatgtaccaccagatcaagtgattacagaagctgacgctattcataacggcatcattttactgggctgtagcattggtttacttgttataagcttattcttccgtaatcgcatgcctcgattaaaataatgttatatagtagggattgggacagaaatgttattttcacaaaattcatttcgttgacccacttcctgctttttctttattaatgacctactacatcaatgccaaattttaatataatttctctaatattctacaaatcaacaaataaaaaagtatcgataaccatatattggcaccgatactttaaaaatcatgtccccacaacataatttttgattagtcacacttcaattaacttattttatttattcatgattgatactattatctgcatctatcttttgagccgtagcttttgcttttttgttactttgtaaaaataagcataaaattaaagcgatgatgctaaatatcgttgcaactataaatgcatcattaatcccttcaactgttgctagtttatttacaaattgtaatagcactttcattgcgccttcttgaccaccatattgcgatgctaattcacgcatatgatcttgtacaacaggattcgttttatctaactcttccccaaaagctgataaatgttgtgtagtttgcgttgtcattacagtaaccaagattgctgttcctatagaaccagctagttgacgcatcgtatttaagaaggcattaccatgggatgccagtcgtcccggcaacgcattaatagctgctgttaccattggcatcataataaatgccataccaaatgaacgtagtacatagatgcccatgattgtcatatatggcgtatccatattcaatttagttaattcccatgttgcataagtcatgacagcaataccaaaaatggctaaaggttttaaaccaatcgtgtctaacaacttaccagcaaatggtcctagtagacccataattagagaaccaggtaataataacaatccagaatctaatgctgagaaaccacgtaaattttgtaagtaaattggtaataaaatcataccaccatacaagctcaacattacaaccatattaattactgttgttagtgtaaatgttggaaatttcaatacttctaaattcaacattggtgctttcattcttaattctcttattacaaatagaataataaagataataccaatcgcaaacattgtttctatctcaacagaaccccagcctttgttccccgcttctgaaaagccgtataacaaagcaccaaaaccaatcgtactaaaaatgatgcctgggatatcagctttagggtttgttgtatattgatataacttaaaccatacaaaaccaactaagattgcaagaataccgataatgaacataccgtaaaacatcacattccagtggtaattttgtacaatataacctgataatgttggaccgattgcaggtgctaaaatcattgcgatacccattgtacccatggcagcaccacgtttttcaggtggataaattgtaataataacaattgaacctaatggcattagtacacctgcaccaatggcttgtaatacacgtccaaccatcatgattgggaaattcattgaaatcgcacatattaatgaaccaattgtaaagagtactaacgcaactaaaaataattttcgatatgaatatttattaaatagatacgccgtaattggtattaaaataccgtttactaacatgaatcccgtcatcaaccattgccctgttgacgcagaaatattaaattccgtattaatttttggcaaagcaacatttaataatgtttggtttaaaatcgcaataaacataccgaataataatgctgctaatattttaccgcgtgaaacaccttcaccaaaaataaagtttttatgttcttttttaattttctcatttactttatattcttctgagttaggatttttagcagcatatacttcttcatcagattcattattatcagtgaatgatgcttgatcttgttcagacccctctgtctgtttgtttagactaacttgattctgattgtctttattgtcaatacgtgcctcttcacgcgccgtatgttgtgacgattgatcagttgttctgtctaaatcacttgctttaaatttagattgatttgattgacgtgtcgcaaaatgttgttccttttgttggcgttttgcttttcttcttgatcttattaataataaattgataacaccaacaataatgagcgctaaaacaatgtagctaataatgaaggtcgtagtcatttaatgacccccttaatttttatggatttttacttcagcgttcattccaggaacaacttgtttagacggttctgaatctaacgtaattttaacaggtataacttgagatactttagtatagttaccatcactatttgatgatggcattaatgaaaaactagcagcagtagcttttccaatactatcaactttacctttaacagaagctttttgaccgtcaatagtcacatcaacatctttaccaacttcaacatctttaatatctttttcgtcaatatttgcagttacatataaatcatctaaattgtaagcataagcaattggattgcctgcttgtaccatagaaccttccatgccatctaatttagcaattgtacctttttgtggcattttaagttccatatctttagtttcgccatcttgaccttgaacagtaactgttgctactttatcacctttatcaagtttatcaccttgcttaacatttagtgatttgatttgcccagaagctggacttgctattttaatttgatcgccatttactttagcattatcagttgttatataacttgttgttttattccagaaataaaaaccagcaatcccaattgctagcagtacaacaaccgtaatgacattaattaatatcatctttttcatgaaacatttcctcctatttgcttttaaaattcactttatttattatagagacatgataactaaaaaaacaccaacaatttttataagagtgttggttaaaattcacaaaggtgtaacaatatgaaacgacaagccaaaatagaaattcaaaacgcacttgttgatttgatggctgaatatccttttcaagaaatatccactaaaatgatttgcgcgtattgtaatattaatcgttctactttttatgattattacaaagataaatttgatttattggataccatcaactcaaagcataaagaaaaattccaatttcttctaagcgcgctacatcataatttcgaaaatattaaacaggataagcttaaactttataaattcttcattattattgctaagtatatcaagcgcaatgagcagtttttcaaagacattttagttacctatccaatgaaaacattattcatagactatataaatttagcgagagattattatcaaaaaattatgaatgactatagtactacagtaaccaataaacagctttatgttacatatatcataggcggtcaagctggggtatttattaattggctttcgaatggttgtaatgaatcacctgaagaagttgctgacattttattggctaatacgattaaacttcaaaaccaataatacggtttcattctaataaagaaatgctataaaacaactagataaagttaaaccaaatggacagataatagtacatatgtaatggtgctatcaatataaaaatgcgcttgggacattaagctcatatgcatataagatgatttttaacatcatttttggatgataggatgttgcgccacgatgatgtctgaattcatctaattcgctatcaggtatcgtttcaacaatttcattaacatatcgcgaaatatcattttgaggaattctaacagaagtttctattggtagtgtaagttgggtcatattatgatttttatacataaggcacctcgttaatttagtttagtggtatttattaaattatacgaagggacccaacacagaaaattcattttattaaattttacatttatgtgcaagttgggcaaagtgtcttatttttttaaagtatttaaaagtaaaattacatgttaatacgtagtattaatggcgagactcctgagggagcagtgccagtcgaagaccgaggctgagacggcaccctaggaaagcgaagccattcaatacgaagtattgtataaatagagaacagcagtaagatattttctaattgaaaattatcttactgctgttttttttagggatttatgtcccagcctcatttttatttttgatgctaaattcataggtctatgaatagctcaagttttgtttttaaatttttcaattcattataatagaagaaactatgtttatcatcgatttgttttaaataccttcatattatatatctgtaaaataattaatataactgctgtagctataataataattatgtaaggtataggattatcttcaccttttacccccactaatggcgatgcaataccaccaaataaaaactgcactaaacctaataaacttgatgaactccctctaccactactactttcatccatagctattgtaaaaccaagtgtcgcaacacctgtcactggtgctattaaaatgataaatcctatcgctaaaatccaaaagttccaatgattaagcaatacaatcgtcactaaaattacaccgataatctgaatcatcgtcatgcctctcatcaatttttgtgagtctataaaatcaacaaggtacccagtaagttgacttgatataatgagcgtaataccaattcctgcaaacatccaactaaattgtattgcagtcatgccataaattttttgaataataaacggagacgcagaaatataagtaaataatattacaaatgtcataccttgaatgagcattggtaatacaaaacgtggcgtcttcaataatattttgaagtttttaaacattgtctttaatccactacttgactcacgatttgtcactgttaatgattcaggtacttttaataaagaacctatgaccatgacgaagccaaagatagtcagaatgacaaagaccatacgccagacagaataatttaaaattatgccccctattgttggcgcaacaactggtgcaataccattaacaagcatcaataatgccataaacttagttagttcattaccactatacatatcacttgctatagctcttgaaataactgctgctgctccacctgtcactccttgaagaaatcttaatgcaaccatcagccaaatattatgtacaaaaacaatacctaaacttgctaatgtaaaaataatcatagctataataagcggctttctgcgcccagttgaatctgaaattggaccagcaaacaaattaccgaacgctaaaccaatcataaacatcgataatgttaattgtgcgttagacgtcgttgtttgaaaatcatgtctaatatctggtaatccaggcaaaaacatatctattgataatgctccaatggcagtcaaagatcctaaaataataataaatatcggtgaacgcttgttaaaatgcgttaaatcattcatatgactatctcctttatattatgattagtttataactatcacgaacagaaactaattttaaatatgctcttttatatattagcattactcacaagtttcatgaacatcattacaacttataaaaggtataaaatgatataaacctcagcactccataattttttcacaaaaaacaatcccttcaaagtaattcacactaattgtaaatactttgaaaggatgttgtttgtattccatgacacatgcatcttatttaagttttatactctatttttctgatgtcttgattaattgcaagcggtcttgcggaccttgttcaagctcatattctttatctacttgcttaccgttttcatttactaatcttacggttgcagtaatcttatcaccatgtttttcggcatctataatttgtggtgaactaatcatcattaaacttcctttagatacacgcttctttacatcatcataaaaagatgatcctttttttatatatgacgatacaaaatcaaaatccgactgattaaacgcagcattattcgctaaagaatatccagcaaagaattctatcaatttgttcttcaagctgttttcttctttttctttcttttcaacatagtcttcgatatcttcactgtcaaaattcaaagttatctctgtattgtattttaaatcgctggctttaatcgtcttcgtctgtgttgtaaatgttttacctttcgctttacctgaagctgaaatggtaatatctttattttgtggatatggaccatacgttttggaacttgaaaatgccatttcacggtcatttatagttacttttttagaactatcatttaattttgtatcgccttttaaagttacagttatatttgcttcttcaaaatcttcagtaacatctaccgtttcagaattactttgtctaaaatcaaattttaaatggcctgcaaaatcaccgttctcagttgatttcatagctggaattctatatgtccccggtataaaattacctattggcgtcactttatttgcttcagctataaccatctttttcttaccaccagatttaaactcatattttgttttttctttcggtttaacaattggttgcttggtaggtgcagtaaagctcatattatcgaaaaagatataacgcgtgccatttttacttacacgtaatatattttgaccagatctggtttgaatataagaagctacactggtcttactcttattcaatttatgtaccgtatttttaaggtcgctgacaaattgcttaagcccaacttcatctttgatatagttaatgtatactttcgcttcttcagaatctactttattatctttagtacttaataatgttgctactttttgtttatcattattctcaatcgcattcactaatattttagtttgcgcttcaggtgaattgaagtttcttagtaaaaagaacaatataataattaagattaaaatgaaaaaaccaattgcccaaggcaccatttttctcatcttgatgttattagtttgtatatcttcatcggttgactttctatataatgcttgacgactatcaaatttatgtccacattgtgtacatatctgtacatcatcttgtgcttgttgtccgcacttcgggcaagatttcatactttcacctcaattctgttcctcttcaattgttatatgtatatcataaaaattattttattattttaccattattattttacaaatattatcccaagaatacaattcaagaaatgattaactttactttagaattgtaccttattacattatttatgaaagtactctctcaattataactaaaaagaaggtgttcaatacatacatatttagtcttatatttgaacaccttcaaaaacctatttatgattgctatatgttttaatgcgatgattgatgacttctaatacttgccttacattttcaatatcttcagaatttaaatcattagtaatatcttgcgcaatatctgtcataatcgcattacgttctttcaaatatgctctacctttgtcagttaaggttatgaatttcaaacgttgatcaatatttaaatttggtttatctaacttaactaatttagcatcgattaactttttaattcgtcggcttactgcggccttatttacaccttgtctttgcgtgatttcactaattgtcaaaggttctttatttaacatacctaatacgttagactgctctaatgaaatttcatattcattttgtaaatctttcaacatttttgcagttaatgcgttaacgttatttataaactgctctaaaaattgaatatggtcttgtaaatgttttaccataattatttctccctaattactatttttataaagtatcctcagcaatcattgtatcgcacatctaaaaaacacaaaaatattgacccatataaaatataacaaattaagacttacatgttgctacgttctccttgctttaataaattaaatcatctacatttatacttaatatttattataggcgaggtgtcagtatgttattgaatttattattaatatttatacttatcgttatttgtccgttaattctcaactatactctgacgttaaatttaacatgctacatcttagttgtcatatcgatatttttgtcactcatctatagcatcatgacctatactttcccttggtctatgtttgttacatttataataatcagtattatcatgctattcaaacatagatatttattttctcatacttctagtcgcttatttattaaaaaattattatctttttcatataaatttgtactctacacatcagcacttctatttataagtacgattcagtcacctattgtgaaaggtttgtctatgtggttagctatattatgtctttccctgttactaacctttatttgttatctcgtttggacagtatcatatagaaatagatcatacaacaaagaagttgatatcataattgtgttaggtgctggtatttttactgaatttgtcacaccaatgcttgcagcgcgtttagaccgtgcacttgatatataccaacaacaagcatcagcaacaaagatcattgtatctggcggacaaggaccagacgaaccaattcctgaagctttagctatgcaacgttatttgattgcacatggtgttgataaaacagatatactaatggaatctcactctataaatacatacacaaactttttatattctaaacaaatcatcaacaatttgtatcatgaagcagttaaaattgtttgtgtaacaagtcagtttcatgtattacgcgccttacgactagcccaaaaattaggtttatctatcgatggtgtcggaagccatacaccatatcactttttcttacatgtgctcattaaagattatctaggcgtaatgtatcagtatagattgttattaacgttatattgttcaagtagttggtttatatgtctatacgctgcttttatttataatagttaacccacaaataaactattattataggttgtttctaatattgcgtcaaactatctttaaatattcgttaatccttgattagacaattgttatattgaaaataaataaactaaagcacgtcatcattttatataatagtgacgtgctttttgtaaacccaaatcgtattctgttatctaacttttatactactatgtcttaaattattaacatttagcgtctttacaagccactaatcagttattttgccatcttctaattcaatcactcgatctgcatattcaaataatcttcgatcgtgtgtaatcataataccaatcatttgttgttctttaatttgttgacgtatcatctcaacaacttttgttgctctatcggcatctaaacttgctgtaggctcatctgctaaaatgattttcggattattcataaatgctctcataatcgcaacacgttgcttttcaccgccagataactgatgcggatatacattcaagcgatcttctaaaccaatatttttcaaaagttgtattgctctttttgaactttgttgtttggtcattcccgcttcttggcctacgagtgtcaattgctctatcacttttaaataaggaactaaatgtgaagattgaaaaataaaaccaatatcttccaatcgtaaatcactagaacgatgctgtttatcaaacaatggtgcatcattgtaaagcactgtaccactcgtttgacttaacaatccgcctaatatcgttagcaatgttgttttcccagaaccagaggcaccatttaaaatgacaaattccccttgttccacttcaaaattaataccttttaaaacttttgtttcagacaaaccttctccgaaatttttgacgatatctttaacaactaatgccattattctgcacctccaattgcttcgataggatccaccttaaataatttgataaatgatagtgaggcacctaaaatcgctactaatataaatatccccaccatcaataaaatattttgcgttgttaaataaaaaggcatcgttacaggcatcataaatgatagtcctactatgatgatcacagcaatacctaccccaattattgttagtgttaaaatttgtaaaactaacgcactcaataaatgtcttgtcttaataccaattgctttcaaaatgccaatttgtgatattttttgaatcgtcataacatagaaaaatgcacttagaacaattgctgtaatagcaaacaaactcacaatcatcatatttaacggtgcttgctctgcttgataactcgcaatattatctgttaaatctttttcattcacaacttgaacgtcatttattttattaagctcatcacgttgttgttgcgttaaatttttcactggataaaatgccgtattaaccttattcaatgcattaaatccgttatcgttcaatagcacaatggaactatgcgaatacattgtgtcgtttaaaataccagaaactctataactagttgaattatttttaaaatgtaatctatctccgactctaatgttgtctgcagctaacttatcattaatagcgacctcatgagcatttttaggataatcaccttttttaagttgtatgcgttgttgtttaacgtcattcattgtaatcacatcttgttctttattagataatttcaatgtttgaatattcattttatatgattcttgatgaataacctttttaatttgattctgttgcgtatcactaagttgcgatttctcaatttgcggctctttcattttttgaacaacatattcatcattatcaaagtgttcaaataacgaaatattctccctaccaagcccttgagctaaaccactaataaataacaccataatacttaataaaagaatgattaatgtgattaaaatataacgaaatttgtaaaacataatctcttttatcgctaatttcatatcgattcacttctccctatttcttctttagcgtcagtataaggttgaaatatgaactcaatatgaacaattgtttttttacgcaaaaatattttacatgtataataaatgaaaaagataagggagtttatagttatggtgcaatgtcttgttgtcgatgacgatcctcgaatcctaaattatatagctagccatttacaaacagagcacattgatgcattcacacaaccaagtggtgaagctgcattaaaacttttagaaaaacagcgtgtcgatattgcagtggtagatattatgatggatggtatggacggctttcaattatgtaatacattaaaaaatgattatgatataccagttattatgttaacagcacgggatgcacttagtgacaaagagcgtgcgtttataagtggtactgacgattatgtaaccaagccctttgaggttaaggaacttatttttagaattcgtgcggtattacgtcgatataatatcaattcaaattcagaaatgaccattggcaacttaacgctaaaccaatcctatttggaactccaagtatctaataaaacgatgacgttaccgaacaaggaatttcaattattatttatgcttgcagcacgtcctaagcaaatctttactcgcgaacagataatagaaaaaatttggggctatgattatgaaggagatgaacgaacagttgacgttcatattaagcgactacgccaaagattaaaaaaattaaatgccacacttacaattgaaacagtaagaggacaaggctataaggtggagaatcatgtttaaaacactctatgctagaattgcgatttattccattacggttattttatttagtgcattaataagttttgtattaacaaatgtttactatcattataatttaaaagcatctaatgacgcgaaaatcatgaagacgcttaaagaagcaagacaatatgaacaatcagctaaaccaacgcacattcaacaatatttcaaacatttagggcaaatgaattaccaaataatgaccattgatcacaaaggtcataagacattttatggggaaccttttagagaagatactttatcacaaaatgctattaacaacgtgttaaataataaagattaccatggtattaaagataaaccattcgcattattcgtaactggatttttcgacaatgtaacagataatactgttggtattaactttaagacaaacgacggttcaatagcagtatttatgcgtccagatattggagaaacatttagcgagtttagaactttcttagccgtcttgttaatgttgttattatttatctcaatttcattagttatcgcatcaacctattcaatcattcgtccagtaaaaaagttaaagctagcgaccgaacgcttaattgatggtgattttgaaacacctatcaaacaaacacgcaaagatgaaattggaacattacagtatcactttaataagatgagagagtcattgggacaagttgatcaaatgaggcagcattttgtacaaaatgtatctcatgaaatcaaaacaccattaacacatattcatcatttattaagcgagttacaacaaacttctgataaaacattacgacaacaatatataaatgatatttatactattacaacgcagctgagcggattaacaactgaattgttgctcttatccgaattagataatcaccaacatttattattcgatgataagattcaagtcgatcaactcattaaagatatcattcgacatgaacaatttgctgctgatgaaaagtcgttaatcattttagctgacctagaatcaatcgatttcctaggaaatcaacgtttgttacatcaagcattgagtaatttattaataaatgctattaagtatacagatgttggtggtgccattgacatcgctttgcaacatagtcacaacaacatcattttcacaataagtaatgatggttcaccaattagtccacaagctgaagcacgtttatttgaacgtttctataaagtgagcaaacatgataatagtaatggtttaggtctcgcaattacaaaatccatcattgaattgcatcatggtacaatccaattcacacaaagtaacgcgtatgtaaccacctttactattacactgccaaatcattcacattaatctctacctcctgaaagaacatttctgtttttatttcaggaggtatcttttatattgattagcgctttctagccacttaacatttaatttctaccattcaacacattttaaatatatcaatggtcgtttatggtttaataattttgaaggaggcattaacctatgatgaaactcaatttatttatcaatgcaaatgagacggaatcttatattgatatacatgcacctaaaatgaatgatcacgttcaaagtattattaatgcagtcaatgatttagacaaatcacatacattagtcggatacatagacaaagaaatccatatcattaatgtatcagatgttataacattccaagttattaataaaaatgtaacagccattacaagcaatcaaaagttcaaactaaaattacgactttatgaactagaaaaacaattaccacaacatttcattcgcatttccaaatcagaaatcgtcaacaagtattacattgaaaaattattattagagccaaatggacttatacgtatgtatcttaaagatgcacactacacctattcttctagacgttttttaaaatctataaaggagcgcttatcaatatgaaaaatttgaaaaactcattatttattagcttaatcattggtttatccctttcactgttctttagtatgttatttgcagacggcaaatattatccactgaacccacaatcaactattggcatattgtattatacgcatttcacagaaactaccgtaatgttgatttctatcattttatggttactcataggcgtcgtctttttccttggagattttatctttaaatacacagattggggcattactaaagcaactatagtgcatttcataacaacgtatgtcggattcttacctttagcaatacttgccggttggtttccactaacaataaattacctaatcatatttacaattatctttattgtggtttacacattgatttggattattcaattctttaaaaacaagaactacgtagacactattaacgagcaactgaaacaattaaaatgatttttattaaaattataaaagctatatattgcattaaagtagtctcttctgcaatgtatagctttatgtcgtatttattttaaatacgcatgaactgaataatatatttttactattttcaaattaaattgtaactgcaactgtcctttacgacatcaactcatcatgataaaaacctatcgaaatgcattttcaaatattttattcataatttctgctacttctttaggactctctttatatcctcgtttgacccaatcttgtaacacaccaatgattgcattacacataaaaataagtaaaaaatacttttccttcgtcgttaacatttttgtatttaatactggtacaaaattaatttcgatacgttgttgtagtgatttttttatgacttgatgtaatttataagcactctcatcacctaataacatcaaaatgagctgaccttcgcttagccaaaaataaatcatctttttaaaaaatattgcttgtgtcagagtttcacttttaagaaatttcttttttgcttcttttaacaatgtattaagatagctgtatataaaatcatctttagttttgtaatgtgtataaaaggttgtccgacttatttgactcttttcacatatatctttaacagttatatcattatatgccttcgtttttaatagatttaccattccatcatgtatgcgatttatcgttttcgttacacgactatccgtaaaagctgtttgatccatatgccccaccttttttctgaacactaaaaacaaatatgttcactatctattaatattttattcgcaatcttaatatacgcttatgatgatatataaataaagtgaaatgtatctcaattttggaggggttatcatggaagcaactatcgcgaagttggataaaattgtaaaaacgtataacaagcatcacgtattaaacgaaattagtatgtcaatcaataaaggtgaactgctagggttaataggtcctagtggttctggtaaaacaacaacaataaagtgtttactaggtatggaaaagatagattctggatctgcagaaattttcgctcataagatgcctaatcgcaaagctttaaatcgattaggctatatggggcaaactgatgcattatacgaaaacttaactgctcatgaaaacctagagttttacggtcgtttgtcaggtctgaaaggaaatatattaaaagataatattgaaaaacatatcgttctagtgaatttagagcaagcgttaaataaaaaagttgcacagttttcaggaggcatgaaacgccgattatctttagcaataacattgttggccgaaccggaattaatcatattagatgaaccaactgtaggcattgaccctaaattgcgccaacaaatatggcaacagttcaagcaaatgaccaaagacggaaagagtgtcgtcatcacaacacatgttatggatgaggcggaacgttgtgataaagttggacttattgtcgacggaagaatatttgctatagatacgccaaccaatttaaaacaaagatttaatgtagatacaattgaagcggtatttattaaagctgaggaggtttgtcaatcatgaaaattttagctattgttagacgagtattaaaagaaatgttacgtgataaacgtacactcgcgctaatgtttctagcaccaattttaatattgacgcttatgtattttatttttaacggtgatgaaaacgatttaaaaatcggtatcgatacatctgtttcatcaaatataacaaaacaattgccatcgtccgacataaaaactcaaacgttccattctcatgaaaatatcaaatctaaaatcgagaataatcatcttgatggttatatttaccaagaaaatcaaacattatatgtcatttatacaaatgaagaccctaacaaatctaatatgatcaaacaaatgattggcaaagctatacaacaagataaaataagcagtataaagcatctaattgaaaaagcacctccgaccatgaaagaaccaaacaaacaagatattaagatttcacattcctatttatacggtaattctgatagtacttatttcgataaaatgtttccaatactaatgggcttctttgtatttttatttgtatttctaatatcaggtatagctttattacgtgaacgtacaacaggtacgttagaacgtgtattatcaacttcaattcgtcgaagtgaaatcgttcttggttatctgattggctatggtatattcgcaatcattcaaacattaatcatagtcctattttcaatatatttattgaacattaatttagcaggtagcttatggtatgtaattttgattaatatttgtttagctattacagcattatctatgggaattttcatttcaacgtttgctaattctgagtttcaaatgattcaatttattccactagttgctgtacctcaggtattcttttcaggaatttttccacttgaaaatatgcctgattggctaggaaacattggctatatcttccctctcagatatgctggtgatgctttaaccaatgttatgattaaggggcaaggttggagtaatatatggttcgatttactaattctaatgatctttatcatagtctttattatcttaaatattgttggtttaaaacgatacagacaggtataaattctccaaaacttttaaatgacttcaatcaagataagcttctaaatataaagcactgataataaaaagaaccactaaaaaacggtaatgtctatcacatttaaaaagacattaccgtttcgtttattatttaacttgtaaatacttagttacttcttcattaattttgtgatataaatcctcatgatctgttaagcgataaccaaatgacggcaccatttctttaatctttggttcccatcctttgaattcatcacgatagcatcgctgtaaaacatcaaacataatatctacagctgttgacgcaccaggtgatgcaccaagtaatgcagctaatgtgccatcatctgacgtaatgacttcggtaccaaattgtaagttacctttagaatcctccgtatccttgattacttggacacgttgccctgctgtaatcacttcccaatcttcatttttagcatttgggaaaaagactcttaaatcatccatacgctcatcattagataacatcaattgtgacactaaatacttcgtaagactcatttctttgatacctgcagataacatcgtcacgatattatttggtttaaccgatttaattaaatccatatgtgaacctgtttttaaaaatttaggtgagaaacctgcaaatggaccaaataacaatgaacgcttgccgtctacaaaacgtgtatctaagtgtggcactgacattggtggcgcacccactgctgcttttccgtacactttagcatgatgacgatcaatcacttcttgatttgtacagcgcaggaataatccacttaccgggaaaccaccaatatgttttgattgtttaattccagtcttttggagtaatggtaaactcgcaccgccagcaccaataaatacaaaatcagattcatatgttgtcgtttcgttagtttctaaatctttaactttaactagccatgctccagatttctgtttcttgatgtctaatacattttgcttatattgaatttccacaccacgttgttctaaattatcaaataactttgcagttaacgcaccaaagttaacatctgtaccagtttcatcataagttaaagcaattggttcatcagacttacgcccttcaatcattaacggtacccaagatttcatttcttcttcatcttgcgataatttcattttttcgaataaaacatttttctttaacgttgcaacacgactttttataaaagctacgttatcttcgccaatgacaaaactcatgtgtggcaccgcttgaataaagcgatctgggttatctaattgtcctgttttaactaaatatgcccaaaactgctttgaaatttggtactgctcatttatcttaattgctttactacaatcaactgtgccatccttaccttcttttgtatagttcaactcgcaaagtgctgaatgccctgtaccggcattattccatacatttgaactctcttcgccaggttgtgctaatttttcaaacactttaatatttttctcaggtgataattctttaagtaatgttcctaatgttgcactcataataccgccaccaattaagatgacatctgttttgctatgttgtgttgtcataacaaatacagtccccctttttaaaatgaataatggaacgttcgagaaatacgacatattaataccactttgaatcaataagtgtctcaacaggttctcatggtgatgctctattactatctactatgtatattaatattttataataacgaaactactttaattatatactttatgtgcgatagcacaaagacaaaaccacaaaccttaacacctatcaaccaatttaatttgattgctgattactcactcttcattttaacataaagcgctaccattattataatgtcaaacttctttcatcaatgatccattaaaaaaagatgagatgttagaaaacatctcaccctctgtatatttatattttgaaatacgtttatttataataatgacaagatgaaagtccaaatacagatgaatattagtaaacatacactgtatttcaatgtcatttttaataattctgattccttaccaacttgttttactgctgcagttgcaattgcaatagattgtggtgaaatcaattttgccgctacaccaccaactgtattagcagatacaagaagtgaaccacttgttccaatttgttgtgcaacagaagcttgaattggtgcaaataatgagttgttatttacaactgatcctgtcataaacacacctatccaacctaagattggtgatagaactgggaagacattacctgctttagcaataccttgacccattgccgcacttaaaccaccataagttgtgattttagaaattgctaagatgaaacaaattgtaagaactggtaaccataattctttaaatgtaacaccgaataatctacctgcatctttaaagttaacctttttagacattaaaattgtaataataatagttaataaaatagctgtacctgtttgtccaataatatttaaagtcaatactaatggtttatgcgtaacttcgctgactgttccaggtaagttgaatttaaatactaatgatgataaagcaccatttggtaagaataagtttttaaagaatggcgcactccaaatcattacaatgactgttaatacaatgaatggactccatgcatgtaatactgcttttgcagaatgtgcttttgcaggttcaatttcttcatctttattaacacgataaatgtgttttggttggaattttttagaaaatactgctaatgctaacattgttaataacggcggaataatatctgctaattcaggtccgctgaaaacagttaataatccttgcgtaagtgtataagtgattgaaactactaaaattgctggtaatgtttctttaacacctctaaaaccatcaataataaagataagtaagaatggaataatgaaatttatgattgccaatgttaaagttgctgattgagaaacacctaatactgaaacatctccaggtaatttcaacgtttctacaacacctacagggataccaatcgcaccaaaagcaccagacgctgcatttgcgactaaacataacatcgcagcttttaatggattaaatcctaattgtgttaataaaagtgcacaaattgcaattggtacaccaaatcctgctgcaccttctaaaaatgcgttgaatgcaaatccaataagtaaaacttgaatacgttggtcttgtgaaatatttgtaatactatcttgaattgttaaaaattgtccagattcaacagtaattttatataacaataccgccatcataacgatatagccaatcggaatgatgccttggaagaaaccttcgactactgcaccagaagcgataccaactggcaatttgaaaaatggtattgcaattagtaatgttacaacaagtgttgtaatggctgcataaatacctttcattttaaaaacagttaaacaaagtaaaaacagtacaatcggtattgctgcaattaaagacgataataataaattatcaaatgggttaaacgtatttactaacataggctgactcttctttccataaagtagtagtgtaattgcttcattaaaatcatgctctggctatagcattttgttatcgataacattttacagaacagtgagattaatgtgatttttttcacaattaaaatataccattttttcagactattaacaatatcactttcctatttaattgttttatttttcattttaaatctgttcatcaaaatgaattgtacttaatgtaatgaagtaacttatactattcatgaattttacataagaccgtgctaaaataaggaagatactacgatgagaaatggaagttatagcaatgattaaacagataaatgtttctaatatgcaaaagtttgaatctcaattaatgaaagctcagtctgaaggttatacacatgccgttccatatgccaatgagataatgatttatcaatctatgttagatgcggttcaattatatcctaagtctatcgtggttgattatactgtggatggacaatacaaaaatgattgtcactatttcggtcaatcatcgatcaacattgccgattgggctcaaaacaataattattatcctaacctgatatatgcgattcaacagactcttgatttaatacattattactctgtagaaacgattttcgatttagctttattgacacttctgaaaggtgatttatcaatcgatggtcatgtcgtttttgattttaaagtccctttagcaacaagtgcttcaatatgggaaactattaaaactattgaagattttgatatgatgtctcagttttatttgaataaaatggcttatattgatcatcatcctataccttttcgcaacctttttatcgaggattcagaacaacttaattggccagatagttggttgtattctaccaagtttatgctacctaaatggttatataaaatagcaaagcaacgtgctgataacaaacaattacaaaacctcggcctgtatacgaagcaaccaaacgttttaaaagatcacatcgtttttatcggtgatcattatcaatatataggtaattcaaaatatttatttacttacttcgttaaacataatccaatgactgcctgttattttgttactgacgatcgtcgcggaccacatttcatatcacctaagtctgaaaaagctgacgaattgattaacagcgcacgtgtcgttttagttgaaaatgatatacctgaaacgttgcaaccaaacggtactttaattcaattacatcaaggcacaccaataatgcaattatttttagatagtaaagaacctattaaaaatatagaaacacctttttatcgtgctaaaaggtataatcgctggttgcaattcgattatgttatacattctgctgatgatattagccacttttatcaaacggcttttcctagtcaccaagcaaatgtattggcttatggtaatcctaaacaccaatatttactacaaaagcgtaacgaaagtactactcaacaacagtataagaaatcgtttaaaataaatgatcaaaaaccagttttattatatgcacctattggattagtgagtgcgcaacaattaccattatcagatgctttattcaaagcctatcatgttgtggttcagggtgttgatgaaacgatgttaccagaagaggcgcttgttgcaccaaagtatctcagtgctcaagacttaattctaatgtctgatgtcgttatcactgattactcaaatataatatttgatgcgatggctatagacaaaacagtagcattatacactccaaatcacagtcaatatattgagtctcaaggtgttaacgaagatatttggcgtcatctatcaaaaatttggtatacagaccgacaattattaattaataatttaatttcccaggcaataccagtgattaaatatccacaaatacaacagaaagaacaaccattagaatctatttcacaacttatattgtctaaaatgacatctaataaatagtgcttaaattcctcagtggctgtgaatgaggtttaaaagtactatagaacgtaaacctttttactttaaaatacgcaaaaaacggtaaaccctaattcatattatagagtttaccgttttaattttttaacttgcatcataattacattaacattattgttggtagtttggatcagtaaccattgcttgtccagtataatcaaccgttacaattgaatattttccatttacgtttgggtctttaaaactaaaaacatacttatagttaccattatgttcttcaattgaataatcattataaactttatgaccattaccaaatttatttgcttcgttgttagctgcatttaaagctgtttggaaattaggcaattgttgtaatgcttgtgatttattaccattaaatggataaatttgacgagccactggcgctgcgttttgtccataatatggtgcaacgtaacttgatttttgattgttagtcgtttgtccactgtttgactggttattattcgtttgattttggtcattgtttgttgcatttgaattagattgttgctggttatcgtttgcactattatctttattatctttgtttacgtctttactatcatctttattgtctttcttatctttagatgaatcatttgtttttttatcttgttgttcagttttcgctttatcatctttttctttattactgtctttttgttggtcactatcttgaccacatgcagctaaaaataatgataatgctaataaccctgtaactaattttttcatacatatctcctcctataattcgatattcattgaataagcttgaaatacatatctaccatgtgtatcatttcatggattgttaccaaagacgtcaacaataatatggtgttttatttcccccaatatcaacaactatcatctatggttctttttattataccctaaattttaatcattattatctaatttttgcgaattttatgttttttatacatttaatcattttactcaacaattttattacacattttacatttctatacatattcaatgattacaacagcaatttctttttatcgacaacagaagttactgctataactctttttccataattaaatctgtatccgttacatcacctgtttgaaaatgatgttcaccaaccactttaaatccatgacgtttataaaatgcttgagcacgaggattatgctcccaaactcctagccaaattttatgtttattatgttcttgtgcaattttttcggccaatgctatcaattgtgaacctcttccaccaccttgaaagtctttcaaaaagtatatgcgctgtacttctaaataggtctcccccatttcttcagtttgagcactattaatattcatctttatataaccaacattcgcaccatcttcttgataaaaataatgaaatgaatctacatggttaatctcttgtgtaaatttttccacagtataattatctttaaaaaattgatcaaaatcattgtcatcatagtaagaaccaaacgtgtcataaaatgttctagttgctaattcaactaattcactagcatcttgttttgaaatttctttgattatcccagccatataaatcctccaataaacagtaatcgaatcaaaatattacttatgtatttttctgccaaaactatttaaaaatacattaacacaaatcaattacaaattgtattgattgtgtgtaacatcaataaatgatacatttattccagtaaaatggccgtatttttaaaagagaaaaagagaggatgtatcgttgtgacagaaacatttaaagcgtttgtaattgataaagatgagagcggtaaagtgacaccaactttcaaacaattatcgactactgatttacctaaaggagatgtgctgattaaagtacattactctggtataaattataaagatgctttagcgactcaagatcataatgcagtcgtaaaatcgtatcctatgattccaggaatagatttagctggtacaattgttgaatccgaagcaccaggctttgaaaaaggagaacaagtaattgtaacgagttatgacctaggtgtcagccattatggcggttttagtgaatatgcgcgtgtaaaatcagaatggattgtcaagcttcctgatactttaacattagaagaatcaatgatatatggcacagctggttatactgccggtttagcaattgaaagacttgaaaaagttggaatgaatattgaagatggtcctgtactcgttcgcggtgcttcaggtggtgtcggtactttagcagtactcatgcttaatgaacttggttataaagttatcgcaagtacaggtaaacaagatgttagcaatcaattacttgaacttggtgccaaagaagttatcgatcgacttcctgttgaagatgatcataaaaagccactcgcatcatcaacttggcaagcttgtgtagaccctgttggtggtgaaggtattaattatgttacaaagcgtttaaatcatagtggatcaattgcagttattggtatgactgccggtaatacttatactaattctgtattccctcacattttaagaggcgtaaacattttaggaattgactcagtatttactgctatgaaattaagacagcgcgtttggcgtcgtctcgcaaaagatttaaagcctgaaaatttacatgagatcaagcaagttattacatttgatgaacttccagaacaacttaacaaagtaattaaacatgaaaataaaggccgcattgttatcgatttcggtgtagataaatagtattcatgaaaaagacatcccgttatgcgagatgtcttttttaatttcttttggtttataaaatttctgatacttcatcaaatagcactttactttaatacattttagggaatcatgtattctccgcccctatcatacttgcaacactaatcaaatactgccaatataacttcgtagagcatagaatattgatttatgtcccagcctgtgtctaaaaataaaatttaatttctctttctatatacatcaaaggcatatattgcccaataaacgactgtgaatacacaactatacaaaataactctctcaatgtttgttaaaaataaatagatcattaaagctgataacacaagtgcaacaaaataatatattatagcttgtcttaatgtatcgattttcattgttctaactcccttagttacaaagtcgaaacttctatatcatatcaacttgaactttaccataaaacacacatttttttaatatcattacttagaaaaacaaaaacatactaagttaagctgtgtagaaaactcagtatgtttatcggtacgatttttcatttttagtatttgatatacataccgcctgaatctggttcggtaggcataaatccaaattttgcatacaatttatccgccgggtagtctgcgatcagacttacgtaggtactttcgacagccacatttttaatatacttcataatatgttccataatttgactgccgtaaccttgaccttggtaacttttcaaaactgcaatatcaacaatttgaaaaacagttcctccatcgccaatcactctacccataccaattaacctatctttatcatacaaggttactgtaaataaggcattaggtaatcctttttcagctgcttcgcgcgtctttggactcatacctgcattaatccttaatgcgcaataatcctcgcaagtcggaatatcatatgtcactttaaccattatttaccccacttttcatcacacaatatatcaacctagtataaatgtttatttacaatagtcttattcgcttctttaaacacttcatgatgacttgaaacataaccctctgcattcgcatctggttggatatatgttttagcaagattcgctgcatttgcaccatcactaaatgcacttgcaattagatgtgattttgcatcatgataaacaatatctccacacgcatagataccaggtatactagttgtcgtattaccaaatcctttaacacgacaatcatcatgcatatctagctttgaagatgtttcactcaataatgtattacaacgatcaaaaccatgactaataatgacatcgtcaaatttaactgcatgcgtatcaccactttcaacatgttccaaaacaacttcacttatatgcgtttcatcatcattgccgaccaagtatttaatacgtgttttcgggcatagtttcacatttaaatctgtcaccagcgttttcatcgcttcatgaccacttacatcttcttttcgataaacaactgtcacgcttttagcaatcttagcaatatcatgcgcccaatctaatgctgtatttcctccacctgatattaatacatctttatctttgaaacgtctgtaactttgtacaacataatgtaaattagttaattgatatctctctacacctttaacatctaattgttttggattaataatacctgcaccaatagcaatgataactgctttcgatgtatatatttctcccgcttctgtttcaacttcgaaatgacgttctgattttttcctaatatctaccacacgttcattcaaatgaacttccggtttaaaatataatccttgcttaattgtatcttttaaaatttcatgacaaggttttggcgcaatgccgccaatatcccaaataattttttcagggtaaattctcatcttaccccctaattcagattgaacatctatcaatcttacagacatatctcgcaatccagcataaaagcttgcatacaaaccagacggaccgccaccaatgattgtaacgtctttcattatgtgcctcctatgactctctatattcatttctttcattaacgcgctcaaattgataattattatcatttaaagacattatactattaatatttatattgttaaaataaatcgcatagttagccatgaattatcaataactatcccatcacaatataaaaacacacctttcaaagtacgaaacaacaatgttcctttgaaagatgtgtatattttttagttcatattattttttaaaagactcatcacgtggttctttaagaattgcttgtcttaaaaggaaaaatagcaacaataaacctgcaagcatacctgtgtgcccaatacctgcaaagcctgcaaatgcttctggagagtatgatttaccagtgacttggaagaatccttttgtcaccatcatacctatagtaacgataacacctatgttatatacatagaagaaccagttaaataagtagtaacttgataatttaaataacttctccaatggtaataatattaaaaacataaacatacctaaaataagtgtatgtgtgtgtacaagtgataattgtgttgtaccagtaaaatcatatgcttttgttagctctctatagaaaaagccactaaataaacctatgatcatataaaaaagaaatgaatataataacctacgcattttgaatcctccctcaccttttcattatatccgattatacctattataacagtgacaaaaaagcgaagatatgacacaactgaatttgatttagcacatagtatgacagctaaaataactttacatcaagtgctatacaaataaaatagctataccatgacgctcgctacaaacgtcttgtatagctatattcctatttattaaattatgacggcacttcagtacgttttgtgctatgttttctaacaatagctgaaattaaacttgatacagcgccaaaaatcataaaccctataaacatccacattgtactatttaattcaatatgatgattcaagtataatagttctcttacacttgttgcatagtgtgtgaatggattccaatcatatacatatttttgataactttcaggcaacatttgtttaggtaacgttacaagttgcatactaaagaacattaaaatgaagaaaattggaattgacttcatacctagccataccataacacctaaaataaggcccacgaaaccaagaatcgcaagtgctacaaaaattgcgatacgatttggatggtcaaaatcaaatccttgaatgccttgcatgaaataaatataaacaaagctacctgcaaatgctgcaacaactgcaaatatcatttgtccaattgaagcaatgatacgatgttgcacgacgatattgttactagttctaaatgcaaagaacaataagatagacgttacgattgaacctatccaaattggcataaacattaggaatggtgcattaccacctgcttggtgatctttaactttattaagtttttcattatccacttttactggattcgtcaaaccattgatgtccgcggcattgactttaacattttgactcgttaatgtttccaaactttgcttcgtaatttgagcattaatattatcacccataccagttaatacagctgatgcaatttgtgaaccttgtaagcttgatccttcacttacaatcgttttaaatttagcctgcttaacctctacttgttgattccccattttttgtttcatttgttgaactacttgtggcggaatttcacctgaagcaactttttgttgcatttcttcttttttgctatccataactactttttgtgttttactcatagcatcttttgaaaagtctttatcaataatagctactccaaagattttttgatctttcaaatctttttcaaggtctttttcactatcaaccttaacccatttaattttattagaatcactatctaataatttatcctctaattttttaccaatgttaacatttttatcttgaatcgttgtacctttgtcctcgtttaatataccaattggtaaatcttttggtttaggattatatgcaggataaaaagctaaagaaaaaattaccaagataatcatagttgctattggtgcaatccataataatttatttttaaatatattcattttattaattacctccttattagacaatgtgttgaatatttcgcatgttgtctattataatatgtaagtgggaataaacaatacacaatgttcatcaatacgtttattaatagacaaatacacccacattgttcaataacacaaggaggttgatttatttttgaaagaagataggcgaattagaaagacaaagtcctccattaaacaagcgttcactaaattactacaagaaaaagatttagaaaagattaccattcgcgacataacaacacgcgctgatatcaatagagggacattttacttacattacgaggataaatatatgttactcgcagatatggaagatgagtatatttcagaactaacgacatatactcaatttgatttgttacgcggttcttcaatagaagacattgcgaatacttttgtaaataatatactcaaaaatattttccagcatattcatgataatttagagttttatcatactattttacaattggaacgcacgagtcaattagaattgaaaatcaacgaacatattaaaaataatatgcaacgttatattagtatcaatcattctatcggaggcattccagagatgtatttttacagttacgtttccggagcaacaatttcaattattaaatactgggtaatggacaaacagcccatttcagttgatgaattggctaaacatgtgcataatattgtttttaatggtccattaagaataatggcagaaaaccgtttgcataaatcaaaccttgattcactaacttaagtaatactcgcttttcctaaatcctttagaaaggaactatatatcatgattacttcattcagacattctgaagatatagataaacatattataaaaacaccattagatcatacagcgtcatggattaatgtagtagaaccagaccgagaagaaattgaaaatcttatggaacaatataatatacctgaagactttatacgtgaccctttggactcagaagaaagttcccgtattgaatatgacgaagatactggttactcattaatcattattgatttacctatcgtcaattcaactaatcgtagcgttctatcttttgtaacgattccattaggcattattattggcaacggtattatcgtaacagtttgtgacgctgaaaatgaatttttagaaaatttacctaagcgtgatattaatttaaaatttcacagcagatttgcattagaaattttaactactattgccgaccattataatcgtaacttacgattacttaataaaagtagaattcgtattgagaaagaactaaaaaataacattactaacaaacaacttttcaaattaatggaagttgaaaaaagtttagtatactttttagctgccttaaaaggtaacgatacaattattaaaaaattattccgtttacctgcaattaaacgttttgaagaagatgaagaattactagaagatttaatcattgaaaataaccaagccatcgaaacaacagaattacatcaacgtatcttagaaagtatcacaacatcatacgcttccttattatctaatgatatgaatacgattatgaagacattaacacttttcacggtactattaacgttaccaacgctcgtatttagtttcttcggtatgaatgtgccgttgccaattgatgaccatagttatatatcttggattattgtggtaggtatttcattaattcttgtcgtaattgttagtattttcttatggcgaaaacagaaattataactaaattaaaaggtatgacagcttaaagtttcatcctattgcatttgcaatgactgatactttgattactgtcatacctctttttttattctacaacttctttatttgcttttcttttcgataaaattaaagtaactgttatagcaacgatgaatgatattgtcataccaacaaagtagtgtaaccatcctgcatgtactggattgattgaaataaatccaggcaatccagcagttcctaatgcgattgctttaaccttgaagaaagcaatatatgctgaaccaatacctgatccaacgatagcgccaataaatggatatcttagttttaagttaacaccaaacatagccggttctgtaataccaagtaatgctgaaatacctgcggcagatgccacaccttttaactttttattttgtttaataataaagaacgctgcaattgctgcaccaccttgtgcaacattagacattgtcgcaattgggaatataaatgatccacctgttttagtggcatctgcaattaatgtcgtttctacagctataaagctatgatgcatacctgtaataacaatcggagcatacaataatccgaaaattaatccaccaattgcaccaccaaattcataaagccatgttaaaccatctgataaccagtaacctaattgtcgagtgattggacctacaaatgaaaatgttagaaatgctgttataaaaatagataacaatggtgttaacaaattatctaacaccgttggaataactttgcgtaaccctttttcaattgaggctaagatataagctgctacaagcataggtaagacttgtccttgataacctacttgattaatatgcaaaccaaatacatcccaatatggaatagccttacctgcttcaactgcttttgggaaatcgtatgcgctcattagtgatggatgaaccaatatcatacctaatgcagcacctaaaaacggattgccaccaaagcgttttgctgcactaaatccaattaaaattggtaataatgtaaatggtgcattcgcaaaaacatttatcatttcagctaaaccagcaaattgactatatacatctatcaatgatttacctgaaaagaataaatctttcgcagtcaaaatgttatttaaccccattaataaaccaccagcaacgatggctggtataatcggaacaaagatatctgaaagcatttttacaaatcgctgtaccggattcatatttttagcagattgtgctttgacttccgaagtggttgatgcttcttttccagttaatttttccagttcactaaatactttattgactgtaccagacccaataataatttggtattgtcccccagtagaaaatgtccctttaactacatccatattgtttagcgcctcttcatttactaaactttcatcatttaaaactaatcgtagtctcgttgcacaatgcgccattgcatctaaattctcttctccgcctatcgcgttcaaaatatcttctgcggattgcttataattcatatatttagcctcctaattagaaccggttccatttattccactttattgtaaccggttccaaaaatatttgcaacactctattatcattttatataaacaattacatcacttttgatagcgcattcatttttattgctatactacatgcaagtatattaacattaattatcggaggtaattttatgaaagaacgtggccatatcgaacagctttggcgtgaagaaaaatatcatgtattgttacacagtcaacagtcttaccaaatgataaggaatgctttaaaaaagaatttatcacttcatcaagtccaacaaatgattgatgatgctttgttaattgaaccgagtataggaagtgtatgtaatgcttttgatcatatgtggggatattttaaaaaatgtgcgaatgaagaagaaagacaacaatcaaaactacttaaagctgattttattaatggtaaaatcgacacccaaactttattaggttttttagcagaacttgctaataaatatgatgttcaatatttactacaaagtcgtgttttaaacacaaaaagaaagagatagattgaaactttagttgtaacggacaaatagtagtcattggagttcagcaattcatactttgtactaaagtttactataatctatctctcaaggtttaaatgtacatatctatattaaaatgcgtttcatgatgttagaagataccatacacatttaattagttacagcataaatcaatttatacccttaattattacattgtttatattttaaattcgggggagtaattttaagtaatatcttgttgctgctaattctattgttaataaattgatattagatgtagaaattgagtgtgaaagttaataatagatgatttagctagtaacataattaattcatatatagtcaaaaagttctgttagatactgttcttgatgaatattctttgatgttaggtgttagctattctagatgagtttcttagatgtggatgcctgtcttgatgaagttatctatgatgttaatataatacttgatgttgattcttagatgttagtgcgatttcaagatgctgattctttgttgttgcactatcttggtgacgtttctagttgtttatagttatcgcatctcttgatgtaaaatctaagatgtttatgcatttctagatgttaattcttcgctgcttaagaattatcttgatggtaaatctagttgtgccatgcattttctcatgatgaatctaaggtgttaattcattgatgtgtgctgtttcttgttgcttcattatcttgatggtgaatttcgttgtctaatgcactttttcaaatgattattctaattgttatggcaataactagatggattttcttagatgttcacttttctagatgtttatacttatcttgatgttttctaaacagaacttttaaacgctttattttttagtagattgtttaaaatttcttagttgatggttattgttgttgatttgaataatttgtagcgaatattttgtaacagggctactaagaatttttataacaagaagtgatttcaatcgaactaattttcagcgtttgatgacaaaagtgtatgtccaaacttaaataatggcgataaaatttaagtcatgggtacatttaatgttttttgattcaaacttccattttggtcaatttgctttttttataacatagttgaatatcaataaaagattagcaagttagttcaaaatggctatgtattgttttttgaaatacataggtttgaaatctatattaattatgcaccaaataatttaattagactctatcgaaaatttccaaattttgcttactatctttctaattttacttttatattgtgcacgatggataaaaacaagcgttttcctaggagttttctttaatttcttttatttttcactattaccttttcaaaaatattcaactataataggtatactatccatgattttaaaaatttccatgttttacatttaaatgatagatttcaatatatattaggcaggagagagaaatatgacatgccaacttaaaatacatcatacattatcgacaataccaagtcgtaatatcaataatattatggtgctattttcacttacaagtaaactcaatattacgattaatggtgaaaccaaagacgtaagtaattatattatcttaattaaccatggtgatatttataatattaaccacggcgaaaatataatcgaattaatgatacccgttttttatttttatcaacaagatgatgatttctttaatggttatttagatcgtcatttattacaatcaagtaattatattaagtcattaattgccgatttaatcagtacaccaacaagttcttctttaatgggaaaaaatataggtcaaagtattatagacactttacttaaagaagcttttataagaatagatcatgaatatttaccaaatattgctttaagcaatccggtgtttatagactgtgtaaactatattcatgacaatattgatgcgcacttgtctttaaaagatatagcgatgcattgcaacatctctgaatcatattgttctaatctttttgttcgatatttaagtatgaattttaaagattattttacaagtattaaacttgttaacgccatcaatttattactttctacaaaacattctattacaactgtttctgaattggccggttttaacagtcatacaaattttgcaaatcaatttaagaattacttgcattttagtcctaaacagttccgttcactcgtttccaagattactgaaccaccacaaatacacttccaacaagataacgtatcacaattcactgagttaatttcaacaattgatttaacagctcagctggctacaaatacaacagatattcatatagatgattttaatccgaaagatcgaagtcagcgtgccaaagtatttgttcgatttagtaatttcaatgaactatttcaatttattttcaatgaatattacgatattaactttgagcacctaccaaaacctgtcgttttcattgacgatattcacgatattgagattagccaaacgaattacaacctgttaaatagatgttttgaaaagcttttcgaaaaaaatataggtttagcaatcgctattaaatcaacacaacaattcgaaacgatgaagcaattaatactaacatttttacaaggcaatcaagactataagacaagcaagaaattagttaaatttatgctcgtattttgctctaactctatgacagcagaagaaattcatttatgtcatcttaaaattaaaaacaaaaataaagaaattaaatatagtgtgacagtcgatggctttttagaaacttattcaaccgtggaacaagtttatgatgtcatgcagcgtcttaaattccattattactttattgatattgaaaattcaaaaactgcaacacatcttatcactaaaaaccaacactatcatcaaactgacactcattttgaacagtataagaaatttattttagattcaggtatatcatcaacacaatttgtatataataacctgtctgtaagtggatttaaatatactaatgatggtaagaatccaattcaattatctgacatagtgtatcacttaatcgcattattgcgatatggcggtggcattagctatcaattattagatgaccattcaaattatatttccttgtacaacaaatatggtagccccctaccattaatgcatttatataaaatgtttagaccttttgttaatgaagacattgaaattacaaataattatgtattgagtcgtaaagataataactaccatttcttattattcaataaaattaatgaccgatatatgtcagacgtaaaacaagacttcattttccataatgaattacctcaagactctttgatgattattaaaacattgaatcatgaacatggttcaattcaacatttgcttccaacaagcgatcaacttgtctatatagaaaaagaaattctagatgaattagacaaaacgaattaccctaaaacggagcttgcagttcaagaagaaactggtcgtacatttgaactcaagttaaatcacgacgaggttaaatatatttgctttaaaccaagctaaatactaacagtcctcttgtgtttagtttcttacgttaaaggctatttatatcataaggagatgatataggatgagtaactcacaagcaattcaagcaattgaaaacgtgctagcaacgtcaaaagttggtgtattatcaactgcatataataacaaacctaatagtagatatatgatcttttataatgatggtcttactttatatactaaaacgaatatccattctgctaaggtcaaagaaattaaagataatccagcagcatatgttttattaggctataacgacacaactaatcgtagtttcgttgaaatggaagcgacaatcgaaatcgttacagaacaagaagtgattgattggctatgggaaacacaagacaaaagctttttcagttcaaaagaagacccagagttatgtgttttaagagtagttccacaatccattaagctaatgaatgataaatcattagatacacctattaaaattgatttataatatgtaagtttttagttttaaaattagtcagcaattgaacatgttagctataaatttcaacagtatcctatttatatatatttcgattttgaaagcgtttaatacttttaactatatttttattatataacaatattttagacacattttattcacatttattgtgattaaggtgtgtctttttaaattaattttatgtaatataaatactgcatttgcaaactgttgtacttttaggtataacagaattaactacatttaaggagattgatgaaccgtgaaaaagaaaaaaggttttggtcttggtattagtttaattgccatcatgttgattgtatgtattgtactagtaatcatgatgatgactggtggaaagaaagatacatattatggaattatgaaagacaatgctacaattgaaaaaatgattagtgaaaaagatgaaagcattgagaagaacgttaaattaccttcagatgcagacgtttcagttaaaaaaggcgactttgtaattgtttataaattagccgattctgataaaattgttaaagtaaaaaaagttgatcatgacgatgtaccacatggtttaatgatgaaaattcatgacatgggcaaaatgcacatgaaacactaattaagctttaattttgagtaatatataagatattaaaagcagcagtaagatatttctaattgaaaatcatcttactgctgtttttttgagaataaatataccagtttatttgcaaatgccctgcgctttagcgcatgcataaaagcccctacacttcgcttcagttcgcctgcgctttgcgcatgcataaaatcccctaacaaccagaggttgtaaggggctttaaatgtcagatagtattttttaaattgattttaaatattcttgaccttttgctttatcatatacgttttcccatttagcaataacaattgttgataatgcgttaccaataacgtttacacatgtacgtaccatatctaagatacggtcaacaccaataattaatgctaaaccttgtgccggtaagcccatggcgcctaatgttgttaataaaacaacgattgaagttcctggtactgccgccatacctttagatgtaatcattaatgttaacatcaacacaatttgctctgataatgttaagtgcattccatacatctgtgcaacgaataatgctgcaatagattgataaagtgctgatccgtctaagttaaacgtatagccaatcggtataacaaaggatgtaatatcttttggtgaaccaaagttttccattttcttcatcattacaggaagaacagcttccgaacttgatgtagaaaatgctaaaagcaattcacttttcaagattctaataatattcatgatattaataccacacatccatgcaactagtcctagtatagcgaatacaaagaacaccattgcaaagacaacaactaatactaattttaatagtggtaataatgctgatgcaccaaatgtaataattgtagtacaaatgaatgcaaacactccaagtggtgctaattttaaaattttattaatcatccagaacacagcttcaagcgatccgcttaaaaattctttaactggttctgcttttttacctactgcagctaatcctaatccaaagaatactgcgaaaaagataataggtaataattcacccttatttaaagcttcaaaaaagtttgtcggaataatatgtacaatggtatcaataaaatgatttccatatgtagattgttctgctgcatgtgcagttgattgatatttagaaatatcacctttaggtaattttgttgggtctaatccagcacctggtttaaataggttaccgaagataatccctaaacctattgcgattgttgtaataatttcaaagtataaaattgttttccagccataacgccctacagttttcgattccccaacgttcgaaatagaaagcgctagtgagcaaaatacaactggtataacgatcattttaattaaatttaaaaatacgtcaccaaatggtttaatgtaatttgctacgttttcttgtccatataataaaagtcctacgacaacacctaacactaatgcaataactacttgcataggtaggctaatttttctcttgaatagagccatagtacaaactccccttcatctgacatcactcaattatatcagaaaattgataattatctataaaaaattaaaatatttatcttttatagatgtcaaaaatcactaatttccatacaaaaactgtttaccttaaataattaaaattgcaggcactaaactgtttcaccagttatacgtttcactattttgatggtttataattctgattgaaatatttatgctttgcagttttcaaacttttcttagtctctgtatcaaagccttcaacaaataatcctttattagtactgattggttgcacaacataagttacaccaggttcatctttaaacgtaacttccttatagaagagaccttttttagcactatactctgttttttctgatttaattttatcttttagatttttctcttccaagtaactgtcaataagttgaatattcttatggccttgatatgttttcagaccaaagaaaaatgctacagcaacaattaatgaaataaataatataatgataactttaatcgcgttttttttcttcttcattatgtaactcctttttgcttatctattcagtatgaacgaatcaatttatttaataaagagtttttaccagattgtaacaatttttttcttctcaatattattatagaaatcgaattacatacacgatgcttttaaaaaatttaataacaaatttcattttactatctatcaaaataattgactacttttaacaattaagaatgatacaattacatttttttcaattcaaaaaatcagtcatatcagtcattaccgatgaaaatactaagatattgatatgttttgcattatttaacatttaaattcaattatagacaattcgataattgcgatgaaatcagtacttgacaactattacacttcataatattgtttattttaacaaggagtgattggatgtatgtagaaaacagctatcttagcaaacagttgtgttttttattttatgtttcttcaaaagaaataattaaaaaatacacaaactatcttaaggattatgatttaacctatactggttacattgttttaatggcgattgaaaatgatgaaaaacttaacatcaaaaaattaggtgaacgtgtattcttagattctggaacactgacaccattactaaagaaattagaaaagaaagattacgttgttcgaacacgtgaagagaaagatgaaagaaacctacaaatttctctaacagaacaaggtaaagcaataaaaagtcctcttgctgaaatttctgttaaagtatttaatgaattcaacatttcagaacgagaagcatcagacattgttaataatttgcggaattttgtttcgaaaaatttcgacaattccgacaaaaagtaactccctatcataagatgatgggcagaagtatgcatcgctatgtttattcattatctttattgcttgtataaatctcgatgctcagttcttttgccctgattccttatcaggcacaaatctatccatttataacttttttatcccccccttttactttatctttttttattctactcatataatgactttgtaatacaaatttatataatggaagtgatgatattgaacttcaatcaattcgagaatcaaaacttttttaacggtaatccaagtgatacatttaaagatttaggtaaacaagtatttaattactttacaacaccttcatttgtaacgaatatatatgaaacagacgaattatattacttagaagctgagctagcaggtgcaaataaagaagacattagtatcgatttcaataataatgtgcttactattcaagctactagaagtgctaaatataaatccggaaaactcattttagatgagcgaaacttcgaatcattaatacgccaatttgattttgaagctgttgataagcaaaatattactgctagttttgaaaatgggctattaaccattaccctgcctaaaatcaaaccaagcaatgacactacttcatcaacatctattccaatttcttagttaaatttaaaatgaatacattactaaagccttaatgtcatgctactaacgttacacatggtattaaggctttatcatttaaatttaaaaatgcttcgtattacatatcaactgtgtttcaatgaaccatattctttttgatataaatggcgcattgtaaataatgcaatgcatccgaataccgctaagaaaataaatgctaaatggcttgaacctgttaaattagctacgtatgtgatgaccaacggtgggaagaatcctcctaaaccacccatcattgatacgataccatttgctgatcctgcttcatttgagaagtatgatggtactaatttaaaaattaagccgttaccaatacctgcacaaatacttattgttaaacaacctacagtaaataatgcgatatggtctgaaatacctaaaataacggcaccgataatcataataacaaaatcaatcatcagtactttaactgcattaaatttatcacctagtataccacctattggtctcaagaatgttgccagcgcaatgaatacacctgaacgaataccagcatctactttgtcaattccaaaatgatttactaagtagttaggtaagaaaataccaaatgcaacaaaagcaccaaaagtaatgaaataccaataacttaagtaatataatttgtagtttttagataatgttttcatttgggccattaatggcactttaattttacgttcttgtgtgtcaccaaaaatgaacataattaatgcaaataaagcgataataattaagtaacttctaactgttgtttgccaaccaataatacccgctatcggtggtgctaaaaatgaagaaactgctgtaccgatattccccataccataaataccatttgctagacctactttttctttagggaaatatttaggaactgatgtaacaccaacagagaaaattgcgccacctacgccaaggaaaaatcctgatgccattaacatccccggcgtttgtgcttggctcaagaaaaatatcgggaataacaatacgataaaacttgtaaagaatacccatttagcaccaacaatatttgttaaataaccaaatggcacacggagcactgatcccaaaataactggtatcgctaaaatgattgatatttgaccttcagttacattgacatcctgtttaataaaaggcattaaaggagcaataatactccaagccataaatccaaccactaaacttaatgtttgtaatgtaagttgaaagccaccttttgttttgtacatacgtttcaccttcaccaaaatcatttattttttaatagatatcaatactctgcctatatgttagaggtcaatgttatttaaagagcctgggaaataaatcaatgttccatgctctacgaagttatattggcagtagttgactgaacgaaaatacgcttgtaacaagcttttttcaattctagtcaaccttgccggggcgggacgacgaaataaatttttcgaaaatatcatttctgtcccactccccaatatagacaaagtattgactacacatttattttattatgattgtgaaaaagtgaacataaggattttcccttatttatggtgtaatttcccctatacaatgtccctttacgatgcatttagacactattttgtcatcattttaatcagattattaaggatcactcacatgcatttcttaaatttttttcaattagttacaattactgcttgaaaatcacgttacgttaccctttatgctgacaacgtaaggaggtttatcatgtataaaatcaatattattagatcagattccgtctataagaatatactcaagacaccattaaacgaccgtgattcaattttcactaaagaaatattagtaccttttaaaaagaaatttgaggtgcaacagattcctattcataatgatgccaagcagacaatgagtgcaattcaatttttagatgcctttcaaaagtctcccaaagatttacgcatgtctgaccaaatgtcaatacaatacctgaataatgatttctggagtaattgcgaaaaatatttaaaagttgctatagatcaatttgcaaattatagtatctcatctcaagtttctaactatcatttcacagtattacttggagatagccaaaaaccacttatgtatctaaataaaaatcgcggtggtgatggtggcataccaggttatattatgatttatttagtgccgagtacaagtacaattaattctatgaaaagcttaattgcacatgaagtaaatcataatatgcgctatcaatatattgattgggatggcggaagtttgattgaattgattatcgcagaaggattagctgaaaactatgtagaatcattgtatggtaaagcgcatattggaccgtgggtaacaaatactaattggagtcgtgataacgtaaaaattaaaaatactatttataatcatttacatttaaagcatatatttgaatcgatgccttttctctatggtgatgatattaataaacttcaaggtaggtctatcgttggcttatctcatgctgccgggtatgcatgtggctatcacttggtgaaatactttttacaaaaaacaaacatacctattgaagttgccacaacacttccagcacaaaaaataataaatgaggtgaatgatttttggcatacacatacactttaaaagatattattgaaattacaggtgtaactaaacgaactttacattattacgatgaaataggattattagttccaaataaaaatgataaaaattatcgcgtttataaacagcaagacttagaaaaattacaaaaaattttaatactcaagtcttttgattttgatatcgctaaaataaaacaatacatttcatatgataatgaacaattgcgaaagttattatcagagcaagtaagcaagttagataaaaagatttctgacttacaattaattagacgctctgtatgtgaatttattaaaggacactctctaatagataccagcattttaaacaagtcactacagacacaatatgataaagaagcatctataaagtatggtcatacgaaggcatatcaatcatttattaaccgtcaagacaacttacaatcacaggatatcagacagaaattgacaatgatcttcaatcaattcaatcaaatgtctttaagtcattatccaatccaagactgtaatgatatcgtggaagaatggaaatcttttatgaacacaatcgctgattttgatgatgaaacattatgctgtattgctaaaacatatgaaaatgatacgcgtttcaaagattactttaattcatatgataatcaaaatttagcatcatatatttcagaagctgttaattattttttgagcaatgagaataagaaagacaatttttaatcctcacttagagactaaaacactgaatacaccctaactaacatgtcatgtccaaaatagacaactactcatttattctctatatcaataactatattaaaagttattccgtttccaataaaataagtatggctttccaaaaggagaaagtattagcttccatacggttataaaaaaatatatttcgaaacatacaaaagcgccagaagataatcatttcctctggcgctttgtatggtattaatttcaaactctaaaactctaataatttctttttcaatgcatattcaacgagctctggtttacttttcaagccaagctttgtcataatatgcgttttatgtgcctctactgtctttacagaaacaaataacttctctgcaatttctttattcccgtaacctttggcaataagtggcaatatttctagttctcgttttgataagattttaaaaggatctgatgtgtttgcagtgtcctgatttgaattagatacaaattcattcactaaagatgttgtaagtttcatatctacatatgtttcacctttatatacagttcgaatagctaacaataattgttcatcaggtgcatttttcaatatgtaacctttcgcaccattacgcaacacatggaacaagtactcttcatcatcaaacatggttaatattaaaattttagtttctggaaaactgtcagcaattttactcgtagcgataagacctgactcacctggtggcatgcttaaatccattagtaacacatcaggtttatattccattactttttgataagcttcgacaccatctgcagctgttgcaacaacttccatatcattttgataatttaaaatcatagagaatcccgtgcggacaacagcgtgatcatcggcaatgactattttcaattttattcccccaatgtatgtttcaaattggaatgttcagtgtaacattggtgccctcaccaattttcgtttcgatgttgacgctaccactgactaattcagctcgttcattcattccatataaaccgagtccagaacctttaggcttagaacttggatcaaaaccatttcccgcgtctattacttcagcaaccaaatggcgcccagtttgacggatacctacatttatttcatttacatcagcgtatttcaacgcatttaaaatagcttcttgtactactcggtaaacaaccgtttcaatatcactatcaaaacgggtatttttaatattggaagtatatatgattttaaccccataattttcttcaaattgtttaaaatatgatttaaacgctgcctcaaggcctaaatcatccaaagaggctggtcttaattccaccgacatattacgtatatcatcgattaatttagcgacaatgtattcaatgttttctgcgtcttccaaaagctttgctgtatcttcttgatatttcaacaatcgcaattgaacatctacatttaacatttcttgaatcacactatcatgtaattccctagaaattcgttttcgctcattttcttgtgcggaaatcgttttacgcatcatacgttgttgatgcaatttttcttgttgttcaatttgtgatgagacattttgaagcgtaaatgcatgaatccctctatcctgatcaataagctgataagttgcagtaaacggcatcactttttgatctttcgtcttcataaacacttgaaaattcgtagcttgtacttgcatggactctaagaaacaatctttacatgattgtacgtcataggcattcgtatacccttcacatctgtgacaaatcgcattcgctactgcactataattatcttcttcggataatatatctttagctgcatcattcatcgcaataattttaccactatcgtcggcaaatactattttttcgattgaatgttcatagtatttttttaataaagcttctaattgtatactgtcctcattaatcatgacctacaccctaattcatctcattatttatcatcattgaaaattccaaatttgcgttgaatatcatcgttatcaaatatttttggtaaagaacgtccatctctttgaccaaataatagtacaccatacacttgatttttgtaccaaagcggtacagctaagactgctgttaatgattcgcttaataaaattggatagtcaatcttttcttctggtcccaatgctaaaccgacattagctataatcatacgcttccctgttttcataacagttccagctaatccacggccttttcttaaaataattaatttaaaccgattatttttattacctgaaacatagtgccattttattggagatgatggtttgttagattcatagaaagcgattgccgcaaaatcataaccttcttctttgcgtattttatctaatgtctcttgaaatctacgatcttcaataattgcttctggtgtcaaatcctttcacctcttatacttacactttattcttacggtaaataatatatctgcgatttatatatgtcaaaggtacactccaaacatgtactaaacgtgtgaatggccaacaagccataatagtgaaacctaataatatatgaattttaaatgcaattggtacaccactcattaatgatgcatctggtttcaacataaataattgtctaaaccaaattgataatgaagttctatagttaaaatctggatgctgtacgtttgttactaatgttgcataacatcccataaatacaataagtaataataagaaattaacaaagatatcggacgctgaacttaatctgcgaatacttttcgtagtaacacgtctcgctgttaataaaaacatccctaccaatgtaattataccaaagatactccctatataaacagcaccaatatgatataaatgctcagacacaccggcagcatccatccacgacttaggtattaataatcctacaacatgtccaaaaaataccggaatgatacctaagtgaaatagcaaactaccccacatcaatctttttctttcaattaattcactagattttgctgtccacgaaaatttatcataacgataacgtgcaatatgacctgcgacaaagacaactaaacataaatacggaaatataacccataaaaactgattaagcatgatgtttcactccttttggtgatgtcaaacataatttcaatgtttttctaagtgcttgaatcacataggcatatggattgttatcttcaccaagtgcattcgccatcacatatgttccatcctcaataatcataatgattaattgaatattctcttcagctcttggatcatttcgccattctgccacttgtaaaaattgcaacatcaacggtagataatcagaaagttcattgtctaccatttctagtccaaacatctcgtacaatacctttagtttcgctaacatttgcccacgttctttttgtgtatcaaacttgttatacgtcatatataatggcgctttttttgtaaaatcaaatgtatcagtataaatcgctttgatttctgataatgaaaatgtcatcattacatttctaaatgctattaaatcgtcataccctggatgatccttcgaaattgtttcttcaaaagtctttggatgaaatgttaatttttccggaaagcatagctgttgcgctatatatccaaaactttcttgatactttttaaaattatcgaaattaatcacggaaaatccctccatagaaattctcattataaatttcttgaccagtttttcctgaacctactgcaacaccacaaccttcacagttatcaccaaagtgttcgccaccatagttatatcccgtactaccttgagcatgatacgtatctaaatatgtttccttatgtgacgttggaataacgaatcgatcctcatattttgcaagtcctaataagcgatacatatctttagtttggcgttcagttaaacctaatcgctctaaacgtgatgtatcaaatggttgttgtgtaacttgggaacgcatgtaacttctcatcattgccatacgctgcaatgcttcttttactggttttgtatctcctgccgtgaaaatattcgctaaatattcaatcggcaagcgcatttcttcaatggctgggaaaatcgcatccggattttgatttgtatttttaccttcgaaatagctcataattgggctaagtggtgggcaataccaaaccatcggcatcgttctaaattcaggatgtaatggaaatgctagtttatattcaatcgctaacttataaattggtgagttttgtgcagcttcaatccaatcataactaatgccatctttttcagcttgtgcaatgacttcttcgtcgaatggatttaaaaatatatctaattgtttttcgtataaatctttctcgtctactgctgaagccgcttcatgaactcgatctgcatcatataataaaacacctaagtatcgcatacgtcctgtacaagtttcagagcataccgtaggcatacccgcctcgattctcgggaaacagaatgtacacttttcagctttgttcgttttccaattgaagtaaactttcttatatggacaacctgtcatacagtaacgccatccacgacatgcgtcttggtcaactaatacaatgccatcttcatcacgtttatacatagcacctgaagggcatgaggcaacgcaacttggattcaagcaatgttcacataaacgtggtaaatacatcataaaagtttcgtcaaattggaatttaatatcttcttctattttttggatgttaggatcttttggacctgtaacgtgaccaccagccaagtcatcttcccagttaggtccccattcaatttcaatattatcccctgtaatttctgaatatgctctagcaactggagaatgattacctgatttcgcagttgttaaatgttcataattatagttccatggctcgtaataatctttaattagtggcatatctggattatagaaaattttccctaatgcaatttttgaaattctacttccagattttaattcaagtttccctttacgatttagtacccaaccacctttgtaatgttcttgatcttcccaacgtttcggataccctacgcccggcttagtctctacgttgttgaaccacatgtactcagcacctggacgatttgtccaagtgtttttacatgtcacactacacgtatggcatcctatgcatttatctaaatttaataccatcgcaacttgcgctttaatcttcaagccaattaacctccttcatctttctaactgctacatataaatccctttggttcccaattggtccataataattaaagtgataactaatttgtgcgtatcctccgactagttgtgttggtttcaaatggattctagtcggcgcgttgtgtgaaccaccacgtgtatctgtaatttctgacccaggcgtttgaatatgtttatcttgtgcatgatacataaacattgtacctttaggcatacgatgcgaaataactgctcttgccgttacaacaccattacggttatacacttctagccaatcattatcttggatatcgtgtttttcagcatcttcatttgatatccaaaccgttggaccacctctaaatagtgtcaacatatgcttattatcttgatacattgagtgtatattccattttccatgaggcgttaaataacgcagtaccaaagcatctgtaccacctttaattttcttatctctattaccaaataccattggcggcaatgtcggtttatatactggtaagctttcaccaaactgttggaaaacttcatgatcaacataataactttgacgacctgttagcgttctaaaaggtactaaacgttctacattcgttgtaaatggtgagtaacgtcggccttgtttattagatcccgggaatactgctgttggtataacttcacgtggttgtgatgttatattcaagaacgaaattttttcagcagcacgctcactagaaatatctttcaacggcataccagtttgttcttcaagatcctcatatgatttctgtgataactttccattcgtagctgatgaaatatttagtatggcatcagcgacattacgtgctgtatcaatacgtggacgattcgctcttacagaatcatcatttgtatcactccacgtgcctaacatactttttagttcttcgtactgctcactgacaccgaaacttacaccatgtgctccaactttccctttttcaagtacaggaccaagtgtgacatatttgtcgtaaattttagtgtagtcgcgttctacaattgcaaagttaggcattgtacgtccaggcaccgcttcaatttcacccttcgaccaatctttcactacgccatatggtgtagatatttcttgttttgtatcatgactaagtggtgttgtcacaacatctttaaacgttccaggtaaatagtcttttgccatttctgaaaatgcttttgccaatgttttataaatatcccagtctgaacgtgattcccataatggatcaatagcaggattgaaaggatgtacatatggatgcatatccgttgatgataaatcatgtttttcataccaagtcgctgctggcaaaacaatgtcagaatataacggtgttgccgtcattctgaagtctaaagagaccactaaatctaacttacctgttgtttcttcacgccacgtaatttcttctggcttttcatcttcatttggtgtagctaataatcctgattttgtgccaagtaaatgcttcataaagtattcttgaccttttgcagaacttgaaattaagtttgaacgccatataaataatgattttggatgattctttttcaaatcaggatcttcaattgcaaattgtgtttgttttgatttcacttcatcaattgcacgttgcaaaatcgcttcattagaatctataccttcatctttagcttcttctgcaaacaacaagctatttttattaaattgtggatatgatggtaaccaaccaagtctagctgctaacacattataatcagctggatgttgatgctttaactcctctgttttagctaatggagattttaaacgatctacatttgactcttcatatttccattggtctgtcgcaaaatagaaccaacttgttccgttttgcaaacgtggtggtccttgccagtctttcgcaaatgcgacagtactccatccttcaatcgggcgacatttttcttgtcccacatagtgagcccaaccgccaccattcacaccttgacagccacataacataactaagtttaagattgaacgataaatcgtatctgagttaaaccaatggttaatacccgcacccatgataatcattgaacgcccttcagtatcgatagcgttttgcgcaaattctttagctacttgaatgacaacactttgttttacgcctgaaatggcttcttgccaagcaggtgtatattttgattctgcatcgtcgtatccatttgattccaatttatgatcaaaacgacgcacgccatattgacttgccattaagtcaaaaattgtagcaatacggactttgtcaccatttgctaaagtgacttgtcgagttggaattgggcgattgaatatcccatctccatcactatcaaagtatgggaattgaattgtttctaattcatacccaccttctgtcattgataatgtagggttaattttagaaccatcttctgtttctagttttaagttccatttcttaccttcttcccaacgttgacccattgtgccattaggtaccactaaactgtcactgattgtgtcgtggattaccggtttccattcactttgctctgtcgtttgtcctaagtcacttgctcttaaaaatcgacctgctttatatccattttcatcttcatctaacatgatgataaatggcatgtctgtatattgtttcgcataattaataaagcgttcattcggttgattaacataatgctcttgtaaaataacatgtgtcattgcttgagcaattgcagcatctgaaccaggattcggtgctaaccagttatcagcaaacttcacattttctgcataatcaggtgctactgaaataacttttgttcctttgtagcgaacttctgtcataaaatgtgcgtctggcgtacgcgttagtggtacattagacccccacataataatgtatgatgcgttataccagtcacttgattcaggtacgtctgtttgttctccccaaatttgtggagaggccggtggtaaatctgcataccagtcataaaaactaagcatttcaccaccaagtaaattgatgaatcgagcacctgctgcatagctaatcatagacatcgctggaatcggtgtgaatccggcaattctgtcaggaccatattttttaattgtatatagtaattgtgctgcgataatatccgtaacatctttccaatttgaacgcacatgtccacccataccacgggcttgcttatactgtttggctttgtcttcattttcaacaatagaagcccatgcagccacacgattgccattgttttcttctaatgcttcagtccataaatcccaaagtttcccacgaatatatggatatttaattcgaagtgggctgtattcataccaagagaatgatgcaccacgaggacagcctctcggttcatattcaggcatatccggaccacaacttggatagtcagtttgttgattttcccaggtaatcacaccatttttcacaaagactttccaagaacatgatccagtacagttaacaccatgtgttgttcttacttctttatcatgactccaacgttctctgtacattttttcccattctctacttttactttctaggatcgaccaattcccattaaatttttctgttggcttaaagaaattcaatccaaattttcccatatttatatcctcctacgtataaaaatacgatgtgtagatgtcgtgtttttaaatactaaaaatgcccaagactattgctttaattagattgtacattttttcacaaatataaaatattagggaattacctaattacttaaggaatttccctatcaataacgggatttcattgaaataatacacaatcatgtgtggtcatgcttattgccaatctaaatcgttcaaatttggcacaacgacaaataaggcttcaacacgaatatattctctcggttgaaaccttacttattcatttatttttataaattagtgacataacactgtattagtatctgcacgatcggttgaaatatatgttacattttcttgctgcttaataaacgtatcatagtaatcatattgcgacgaatgatatgtaccattcgatgtatcatttgggtttagcaaacagccataaccttcgtcatataaatgttcacagagcataagagcgtcaggtttagaaccacttactacataaaattgctgagtcggattagaagttgttgagacattttctgtataacccactacttcgcctataatacatatacctggttttgcctcaattgcgtaatgctccagtttcccaacaatattacttaagcgccctttaacgacgaattcattaaaacaagatgcttgaaaaacaatcgctatcggataatcaatatctgtgtactgttgtatctgggcgataattttctctaaacgtttaactcccatatatatcgccaacgtaccaccatttactaaagcgttgacatctacttcattttcttctgaatctttaaaataccccgtcgaaaatgtaacacttttagcaacagcacgcatcgttaatcctgtttgcatcgtagcaactgcagcactcgcagatgtcacaccaggtacaatttcaaacgcaatattaaagttgtttagtgtgtcaacttcttcttgaactcgtccaaatattgctgggtcgccacctttaagcctcacaaccttgttatatcgacgtgctgcttccacgatacattcatttattttttcttgctgaatgtgttttgcatatggctttttaccaacatctataatctcagttgtcgacttcgaatattgtaaaatcaacggattcactaatcgatcatatagtataacatccgcttcgcgtattaaacgctcagcctttttagtcaaataattcggattacctgggcccgcacctatcaagtaaaccttgccgtaaccatttacagacatatatatacgttcccgtctgtaacttctacctcatatacatctacacaaccttcatcaggttcttgtacaatcccagtatttaaatcaatcttttgatcatggagtggacagaatacatattcaccactcactgttccctctgacaatggcccttgtttatgcggacaaatattgtgaatcgcgtgaattgtaccactttcagttaaaaacaatcctatttctttgcctttgacaataacctttttaccaattaagggtgtcaattcatctaaagttgtcactttgattttctctttcgtttccatgtattacaccttctccacttcaaagatttttcgagcttgcgcattactagtgattgcttcccaaggttcagcttcgactgcttttttagcatccataatacgttcaaataattcattctgtctttctggatcaagcaacacttctttaacattttcaaaccctagtcttcttaaccacggtgctgttctttcagcataaatacctgtctcgcgataatattgcatcaaagcaccacataatttgattacttcatcttctgtttctacagttgttaaaaattcagctttttcaacttctgtaccaccattaccaccgatatagatttggaatccattttcaactgagataataccaaaatctttaacacctgattcaacacaacttcttgggcagcctgatacacccattttgaatttatgaggtgtatcgatgtattcaaatgttttttctaaacgaatgccaagtcgtgtcgtgtattgcgtaccaaatcgacaaaactctttaccaacacagcttttaactgagcgtgttttcttaccataagctgatgctgaacgcatacctaggtcttcccatatatttggtaattcttcttttttaactccatacaaaccaacacgttgcgaacctgtcactttaactagtggcacatgatatttcttagccacttctcctagacgaatcagttggtctgcatctgtaacacccccacgcatttgaggtataacagaaaatgtaccatcattttgaatattcgcatggtaacgttcgttagcaaatcttgattctctttcatcttcatgatcatgtggataaaccatattcaaataatagttaatcgcaggtcgacattttggacatccacctttgtttttaaagtttaaaacatgtcgaacttctttagatgtttttaaacctttcgctcgtatttgcgtaacaatttgatcacgtgtcaaatcagtacaaccacatatacctgcaggtttagcagcaacaaagtcatcgcccaacgtgtgctgtaagatttgagcaatttgcggtttacatttaccacatgaattacctgctttcgttttagccgtaacttcttcaactgtagtaaaaccattttccgtaattgcatttactatcgtgcctttatcgacaccattacagccacaaattgtttcatcatcagccatatcagcaattgatagcgatgcctcttctccacctttagtaagcaatgataccagtgtgtagtcttcagtagattcaccttttttcatcatgttataaaagcgtgaaccatcatcgatatcaccatatagtactgcaccaactacattaccgtcttttaaaaagatttttttatagttattatcaacgctattaaatatttcaatacctttaatttcagcattttcaacaatttgaccagcactatataggtcacacccagaaacttttaatgacgtaaatgttgttgatcccttgtatccgttcgtttctttatttgttaaatgatcagctaatactttaccttgttcatatagtggtgcaacgagtccataaactttgccgttatgttctgcacattcaccaactgcatatacattactatcacttgtttgcatcacatcattgacaacaataccacgattaacatctagacctgattctttggctacttctgtgtatggtcgaatacctactgccataacaactaagtctgtcggaatctcgcgtccatcagccaatttaacaccttcaacatcatcttctcctaagatttcagttgtgttggcttgcatttcaaacttcataccttgcttttctagatctgctttaagcatatttccagctttacggtctagctgcatttccatcaaccattcagctaaatgtaacaccgttacttccataccttgatctaataaaccacgtgcacactctaaacctagtaagcctccaccaattacaattgctttctttttagtcttagcaatgttcatcatttgttcagtatcatcaattgttctccagccaataacacttggtaatgtcgaacctggcactggaatgacaaatgctttagatcctgtcgcaaatattaatttatcgtatgctacttcaataccatttgcagtcgttacattttgatttgctctatccacgtcaactactggatcattggtaattaacttaatatcgtgttcttcataccactcatatggattcataattgtttcttcaactgtcattttattttgtaaaatatttgaaagcatgatgcggttatagtttggataaggttctttaccaattaccgtaatatcatataaatcattggcacgctctaatatttcttcgattgttcgaatgcccgccataccgttaccaatcattactagtttttgctttgccataaaatatgcccctttactacataatatttatttcaaaaaaaggtgttaacttttcgttagtgcttttatgttttcattggagtcattaagactttctaatctatcgttaataatttgttttaaaatcgggtcgaagttaattgaaggtgtgatgtgtatatctgtattaataaccatgtcattcatttgctgcttcactttgttaacaagtcttccgtcatataaaaataaaggtacgacaattaatttttgatactgtctcgcaatatcttctaaatcatgtataaaactaatctcaccatatagcgttctcgcataagtaggtttattaatctgcaaatgttgaacgcatgtctgtaactcttcatgtgcttttgtaaacttgccattaatgttgccatgcgcaacaacgacaacaccgacttgttgcatttcatccacgcgcacctcatcaatacgttgcatgattatttctgtcattaaaggatgtgtgccaagtggctcgcttacttctacctttatgtctggataccgtcgtttcatttcatgaacgatattcggtatatccttgagatagtgcatggcactaaagagaagcaaaggtacaatcttaagctgtttaacgccactttgaatcaacgttgtcattactgtttctaaatcctgatgctcactttctaaaaatgcaatatggtaatgatgtatgtcatcttttactaattcagatataaacgcttctaacgcttgattctgccgaccgcgcctcatgccatgtgcaacaatgatattcccattcacatttaccaaccctttcacacgtattgtataccaaatcatttcgtttttgtgaaaagaatcacattataatgtaaaatcagggaattccctgatgcctgtagtcatgcatattccttataaattttccctttttgttaaatcaaaaaagcgaccatatatgaatccctactcaacatttatttgagcaagcatcaatatatcggtcgcttgtagtgtatattattatcttaaaatggtggttggcctaatattgtttcgtcaaagcgctcgggtatcaatactttgcgcatgatcacacctaaatcgccatcatcattttcatgttcgctgtatatttcataacctcttttttcataaattttaagtaaccacggatgcaatcttgcagatgtacctaaagttacagcagctgcctttaatgtatctcgtaaaaatgtttcttcaacataagtaagtaattgactaccatagcctttcccttcatactcaggatttgtcgcaaaccaccagacaaaaggatagcccgaaatgcttttcacacttccccaaggatatctaaccgtaatcgtagatataatttcatcatcaattgtcatgacaaatgtagtatttttatctatattttctttcacagcatctaaatttgcatttaccgaaggccagtctatgccaagttctctcaacggtgtaaacgcctcatgcattaattgatgtagtgctactgcatcattttcatttgcgagtcgaatcgtcgtatttgccatttgaatccacacactttctgtttattttaaatgaatcatctttaattttagctatgcttatcttttatagcgtaccaacatttagcacatgtgtcagataacatgcctcattgatataagataagtatgtgatcatcaattatttcattattgaaagcaaagtaaaagtctaggacatgaattaatgatatgcacgcttcaaagctttcatttttcaatgtctactttgaagcgtgcagttcataatgtcctagactctacaatgttatattggcagtagctgactgcgtggccccaacatagagaatttcaaaaagaaattctacagacaatgcaagttggcgggggccccaacacagaagctgacggcaggccagcttacattaatgtgcaagttggggaacgatgcccccaaaaaggatgattctaaattcattgttgtcacaacatcttcaattattacttcattactgttgctctaaacgattgcgtttaccatttaaaaatgcataaacaagtcctacaaaaataccgccacctacaaagttaccaaggaatgcaaaaacgatattttttaatacatgtaaccaagatacagcatcaaggttgaagaacaccatacctgcatataaaccagcattgaatacaacgtgctcatatcccatgtatacaaagactataacaccacaagcaatgaagaatgcttttgtcaatccgcctttgaattgcatagaaataaaaataccgatattaataaagaagttacagaaaataccttttgtaaaaatattcaaccaagtcgaatcgactgtctttttctgaactaaggcagttaaggcttgtgtcatttctggtgtcataacatgtgcatatttcattaagaagaataatacaaaaccacctaaaatatttccaaggaaacaatataataaaatccacatcatcttattaagagaaacaactttataataccagccaactgtaaaatacataaaattacttgttaataattcagaattcgttagtacaaccaagaccaatcctaagctgaaagcaattgctcccattaaattaatgagaccatcaacatgtgtacttgcgaattgtgttttaataccaaacataaaaacagtaacaatggacaataagaaacctgccatcatagatttaagcatgtatcgtcctggtgtttgctgtaccatcacttgtttcatttgaacagatgatgatattgagtctacgattgctttagttgaatacgtatcttcaactgttttattattttttatcacagcacttcccccatttactattatcaaataaattttacctattaattatattagtatttagatgtaattcatagattaaaattcagaaaattctttttaccaattcaaaactaatatttactcataaaaatagcgagatagatatcgcgacataaaacaattggtatcattttaattgcgctcatctcgctttatgtaagtattacttattcttttttaaatttgaaaagtaatgtaaaccatatgcaaatataccgtagcctacgactgtacgcaaaataaatctaacaactttatttggtacacatttcgaagtaacagtaattgaagataaaagcgtagtaaaaatatataatattaatactttaatgtaacgttgtgccatcgaatcacccttcattcaattaataatattacgttattattataaactgaatggcatataaaattttttacatattttcaacaactttatttcaataaagcatcaagttgatccaatgtttgattcatcccttgctcaacacccatgtttatgacttgttgagcggcttctttagttggaaataccgatgttgatgtcactgtcgttttcgttgtattgaactcggaaaatgacaaagtaatcttcatgcttggcatttttgtatcttttgcaccttgaggtgtcgcaaacgagtcaatatattcaattaaatatggacgcttaaccgttttatattctgctaatgtatagcttgtcattgtgggtgttttaatcgcgtaaaatgcatcaccgcctgaaacagcattaaagcgaaacactttggtactagcgtcttttggatgaaaccatttttcaaataatgcctttgtcgtataggcatcaaacaccttttcaatcggtgcttctatcgttcttgaaaaaataattttattatcttcaactttaatcgtcatcttcccactccctatcttttatatttactcatcttaacatgcattgagtgacatatgttaccaaatcatttgttataaactatagtaatattaatcattccctctgttgaaattgataactacgaaataaaaaacacactctattcagctattaacagttgagtagagtgtgcaaacctgttgaattaatgcgctaacatttcttctttgatttggtctttatttaattttgaaggataatatgttggccagttatccatttcttttaataacgcgtcattatcattacccataaagatatggaagtgttctgcctttttaggtgcaatgttgtgatcgctaaattggatgaatttcggtaagtctttatcattaccatcgaccaatttaaacataaatctcacgccacggttacctttaggatatttcaatgttttcttaccattgtattcatatttaccagtgtgtttcgtaccatctttagtaaatgtaatttcatttccttttatatcaatgttagtaatatcagttttatatcctttgtcataataagcttttaaatctttagcagatttcttcggatcattttcagctttatgttccatcacttcatcaagcgtaccgtcttttaagtaagggtaaacagattgccattcaccagcataatcgcttaattcacggtctttaacttgctcatctttaaaatacccatcagaaattgctttgtcgtgtttactttcagctttgtcgtctttcactttaacaccactgtctaaagctttaccgatattttcaatattcgatttcattaatgattgataggtaatattatcttttttctgttgttctttatttaaagactccatgttgtagaattttaaaggcttcgcatctgtttctttacgaattgtttcagtcactttattcgcaacattatcttcgtaaagaatatatttagcattgctatctctaatttctttaacaattttagtcaattctttttgtgatggatcttcagcattcatgttttgaatacctttttgaacaaaaccataacgatcagctaagtatccaattgattcatgtgaaatgaatactgcattaccttgcttatctttagtaacttgcttcatatcgttatcaattttcttaagatcgtcgtttaattttttgtagtttttctcatagtcatctttatgttttggatctttcttcactaattcatctttaatttctttagcgaaagtttggttaattttaggatctaaccatacgtgtggatcatatccgccatgatgatgatgttcttctttcccatgatcatgtccctcatgttcatgctcttcaccatgttcgtgttgatcagttaaaagctttgctttatctaatttatcttctaaagacagttttttatctttatctttaatagtagatgcaactttcttagcaaccggatctaaattatcccctgtatacataaacaagtctgacttgcttgcacttaatatatctttttgtgttggttcatagctatgtaaatctgtccctgctggatagattgatgataccttcacgtgttttccaccaatttgctctgcaaatgattgcaatggataaactgtcgttttaattgttaccttgccatctttatcttttccatcatcattcccacatgcggctaatgataaagttacggctggtacaagaagtaacatacctaatttctttttcatagtcaccctcctaaatagtaatctttacgttttaaaattatatactcatgctacttaaaatacaagcactgtttttataaataatataaagtcgaatcatactttaggtatttaccacttttcgttttatctaatacatgactattgtacaaatatgatacagaaaactttatagtatttacgaacgtcgtaatataagaaaaaagacaatctctatcatattgctaatagaaattgcctttcatattgtcctaaaataacttaccctatttttatagtgtgacttttagatttaataatggtatttacatgatgctatttttatatgattgtcatctactgtataaaccaatctatgttcgtgattgatacgtctactataatacccagtcagattcgattttaacttttcaggcttacctatacctttcaacgcaccatttctgtcaatacttttaattaactcattaatcttcttcaccatttttttatcgttctgctgaaaatacttataatcttcaaaggcttgaggcgaaaacgtaatatttaacctaaccattatacatctatatctttcgttacagttttcccacgttctagatctgcaattgattgagctaagtgttcagcattatttggattctgttggaggtaaagtgtttccatcatggagttataatctgattctgacatgattactacgtttttatcatcagtagatgttacagttactatatcactatcatcatttacttttgtcataagtgcctttaaattctgtcgagcgtatgaataatttttaataatcatatttatcgcctccttttaacacaccccaattgtacaaatatttgtacaataaaacaagagacacagaaaaaaccactaatcaagattttgcacggggaagaatcaatacctatcctgtactgattccctactaaacaatgtttacatgataatttccacctatttagacttcatacattaaaaagacaatctctatcatattgctaatagaaattgcctttcatattgtcctaataaattggtatcacttacttatctcaacaattaagactatttgattttatcttttaataatttttcataactttcataatcatatggatcttcaactttctcgccattaataaatgcagttggtgtcgtttttatatgattatctttagctatttttttatctttctctgcagctttccaagacttgctatcttttgtcttgtaatcttttataattttattttccgtctctttatctaaatgcagttgtttaatatgtttatctaatagttcttttgttaaccattctttattttcatcttgctgggcagcaaataattgcttttgaaaatctaaaaatgatttaggtgcatacatcaatactgcatgactcgcacgtgaaccaacaattgagtctttacctaagaaagctaaattgacaaattggtattccactttgtgattatctatataatttttacgaaactttggcatgactttttcatctaattctttacaataaggacatttatagtcgccatatatgacaactaatggtttgccgtttttcgaagatgtcgttgctgattcttttttaccgcaagctgttaaaattaacatgctcactataaataatgttagtaattttttagtcataataactcctgttcatatctagttcgtcatattttcttcatgataatccgcatcatgttgttgataatatcgtctcgaatcaaaatcttgcttatatgatacacgtttatcactaaaatcatatgcataataatgcacttcatcatcattactcaaaggtttataagctaaaatgataattttatccttatcatagacataaatattagcatctttgcgttcaaaatgatcaacacgatcaccgttgccttttttggcaagttgttcttgtttttgattttgaattttaactgcttcatctatttctttcacatatttatcattaccacatcctgatataaagactagtaataataataccgtcgccacaaatcgcttcaatgctcccactcctactatcaacttccaactaactttcaatataattaatactatacaccgtcaaacatcaatgcgctacaactactaccaatacatttaatataaatatccaaagaaataacagttatgtatagtcaaagaaaaatatatttcattttctatgtgtatttgcaatcagtttttgataaaataaaaaaatagcattatatataaattcaaaaattacagttcaattcagagagggatgggataaaatgaactttgtaacgttgacttcggatgagttcaatgcgtttacaacaaagcatttttcacattacacacaatcagctattcattacaatcatagagttgatttaaaaggcgatgtgcatcttgtaggggttaaagatgacaatggtcaagtgattgcaggatgcttattgacagaagcacgcacacttaaatttttcaaatatttttatactcatcgcgggccagtgatggattatacaaatcaatcattagtagcatttttctttaaagcattaacgtcatatttaaagaaacaaaattgtttatatgtccttgtagatccatatttaattgaaaatttacgcaatgcagacggtgaaattgttaagtcttatgacaaccgagcatttgttagaacaatggacacattaggctataagcatcaaggctttccagtcggttatgattcaatgagtcaaatccgttggttatctgtattagatttaaaggataaaacagaagaccagttattaaaagaaatggattatcaaacgagacgtaatattaaaaaaacatatgatattggtgtcaaaactaaaacgttaacgattgatgaaacgcaaacctttttcgacttattccatatggccgaagaaaagcatggtttcaaattccgtgagttaccatactttgaagaaatgcaaaagttatacgatgaccacgccatgttaaagttggcgtatattgatttaaacgagtatttaaaaacgttacaattaaagcaacaacaattaacagctgaactctcaggtgttgaagaggcattggaagaaagtcctaattcaaagaaaaataaaacgaaacgcacacagctagaacaacagctgaatagcaataagcgtaaaatcgataatacaatagaacaaattgaacaagatggtgcagtgttaaacttagcttctgctttgtttatctacaatgaacatgaagtttattacttatctagtggttcaaatcctaaatataatgcttatatgggtgcctaccatttgcagtgggaaatgattaagtttgctaaagcgcatcatattgatcgctataatttttatggcattactggtgatttttcagagtcagcagaagactatggcgtacaacaattcaaaaaaggatttaacgcacacgtagaagaatatattggtgattttattaaaccaatcaaacctatactttacaaattacaaacatacttaaaacataaacgccgttaacagtttatgctgtaacatctagaatataacaaagaaccacgcatcatgtatatggcatcatcgccatattaaaacatgatacgtggttctatttgtttattcttcattaataacatttaaaaagcgttttagttcttcagtttttggattgttaaaaatctcttcaggtgccccttgttctccaattacaccttcatgaatgaatacaatgttattagatacttctctagcaaaacgcatttcatgtgtcacaatgaccattgtcatgccctcattcgctaaatctttaatcacctttaacacatcattcacgagttcaggatcaagcgctgatgttggttcatcaaacaacatcactttaggattcatagctaatgctctcgcaatggcaacacgttgctgttgaccacctgataatgcatgaggtcgttgatctttgacatgtgtcaaaccaactttctcaagtaattctagagatttctcacgagcttcagcctttttcaactttttaactgtaataagaccttccattacattttctaatgccgtcttatgcggaaaaagattatagctttgaaataccataccagattgtttacgaacttctatttgtgattttttatctttagatgtatatgttttgccgttaacaaatactgtaccttcagttggaatttctaacgcattaatcattcgtaacaacgttgttttacctgacccagatcggccaattaaggttacaacctcacctttgccaacagataaatcaatacctttgatgacttcaacatcattaaatgatttatggatattgttcaattgaatcatgagcgataccctctttcaatataagattcgtagataccttggattattgaaataataaagcataccacccagtacattagcgcaactaacacataaattgttaaatattcatatgttgtagacgcaacttcttgagcttttctaaacatttctgctactaaaataaatcctagtaatgatgtatctttgattaaacttaaaaatgtattacctagtgcaggtatagatactcgaattgcctgcggtaagatgatgcgttgtatcgtttgacgatatgtcataccaatagaatatgcagcttccgtttgtccttttggtatagaaataataccgccgcgaataatttctgaagcatacgcacctacatttaatgacaagccaataatggcagcgaccacaggcgccaatgtccattgattatctgcatcattggttaataatctacctaattctggaataccataaaagatgataaataattgtactatcataggtgtcccacgaataatagatacatagacacgtgcaatacttcttaaaactttactcgttgaaatgcgcatcaatgctgtaaataatgcaatgattaaccctaatacaaatgttacgagggtaatcggaattgaatatttcaccaaaccttcgagcataggcccaaaagcttgttttgcagcatcaagtgcatgtagttgttcactatttagatttagaaacatcttgaccaaaccatttcttacctattttagctaattcaccgttttcctcgatttttttcaagccatcattgaatttttgaactgtttcgtcatccacttttttagaaaatgcaaatgcagatttactttgttcagcgttacctttgattgccttgatcttagcattaggtttttgttttttataatctaagtatgacagactgtcattaaatgtaccatcaacacgcttagacaataataaatccattgattggttaaagccatcaacttttgtaatatcagcacctttatccttagctaatttaccataattagatgtgaatgtttgtgctaacttcttacctttaacatcattaaaatctttaatatctttttcattttcacgaataactaaaacagcacttgagaatgtgtaaggcttagaaaatttatatttcttttctctatcaggattaatacccacttggttcgcgattacatcaaaacgccctgcgtctaaacctgcaaacatagagtcccaagaagtttcgttaaatttaagctttaatccttctgctttagccactgctttaataacatcgatatcataaccagttaatttgccatctttatcatggaaactaaatggtgcataagtaccctcagtaccaacattaattgtcttactatctttactagcttccttgtctttagacgaattgttcccacatgcagctaatatgaaaacgaaagctatcaccacaaataaaagtcttttcatagaatatatctccttattcttattattctaatcggaataaaaatattttaatctgaatcgccagataagtcaatatgttgaacttttgctaaaaagcgttatatagctagcaacttatatttattgatgtgaatcaacttcttttttctttccttgtaacataaatgaacaaaagaaactaatcactgtaatcaatagcgcaaataaaaatccagcgtgataaccatgtaacatcgtatcaattttaatttgattcatcatctcaattttgttcatgccattatagtctgacatagttggagaaaagtttttacttgcatgagataaaatagtaattaatgcagctgttccgatagaaccagcaatttgttgtactgtgtttgtcatagatgaaccgtgtgcattcatttctggctttaattgattcatcgtatgtgtcattactggaattaatcctaacgcgataccaaccattcgaatcgcataaactgttgccaacatgattgttgatgtttgttcatccattacaacaaaataagccgtagtaataacaacaatcgccatacctactaaagcaagctttctaggaccaaacttttcatataaagcacccgaagtcatcgacataaatgccataacaattgctcctggtaataaagttaacccagaatctaaagctgaacgatgcaataaattttgcacaaagataggtaaaatcgtttccgaaccaatcatcgataccattgtgacacccataataatgataccaactgtaaattgtttatttttaaatactgcaaaatttaataaaggtgttgatagccgatattgacgtaatacaaataatgcgactaaaacaataccaccaatcatagatactaatacgataggattatcaaatcctttttctgaaattgaactcgttccatacaataacccgccgaaacctagtacagaaaaaatgacagaaataaaatcaataggtactttaattgtagttccaacattttttatcgttttaaatccaattaaaaatgtcacagctgcaattggagcgacaacatggaaaagcgatctccagttaaaatattcaacaagataacctgaaagtgtaggtccaatagctggtgctaaaccaattaccaaaccaaatatccccatatatttaccgcgttcatgcggttggaaaacatccaaaatcgttgtcatcatcaatggcatcataatacctgcacctaacgcctgaataattctagcaactaataatgttgcaaagtgcggactcaaaccgccgagtaatgtacctaagaaaaagatagaaatacccactaaaaacacttgtcttgttgtataacgttgtataacaagtgcggacaaaggaataacaatcccattagtcaataaaaaagccgttgtcagccattgaacttgtgtatatgaaatttcaaaatctttcataatacttggtaaagccgtcactaatagtgtttcatttaataatccaaaaaatccacccatcagcatagtaataatcatcgttaatttttgtttcttcgacatttaaagcttccccctcaccatctaaaaaacgacacacatttttagatatccggtaattatacccattttcaaaaaaaatagcacgactttattacaatttctttaaaacgtaatcattactatttacatatgagtagttatcgctcataatatatttacaaggagggatagagatgaaattagatttacagactgctcgtcgtaatttaaatagccctaacattaaaacaagaaagcgtgctttaaagattattaagcaacacaaaagagcgaaataattgttttaatttgactatattgtatgtctaactatattttcgagtatccctagctcgttaatataaactctatacttaactatttccttacattacttcacatatttaagagctgcatatacactcactccttgtgtacatgcagctcttttttataagtagtatttatctataacttctaaatcatccgttaattcataaacaagcggtgcacctgttttaatttcataattaatgatatcttcatctgacacatcttcaagatatttaatcaatgcgcgaattgaatttccgtgtgcagaaactaataccgtttgaccatctagcaaatattgtgaaatatgatctgtccaaaatggtatcactcgaactaaagtatctttcagactttcggaataaggcatcatacgtttatctaaatgattatatcgacgatcagctaagtaagcttcacgttgttcttcggtttcagcaggtggtttcacatcataagaacgacgccaaatatgtacttgttcctctccaaattcttttctagcatcatctttatttaagccttgcaatccaccatagtgacgctcatttaaacgccagcttttatatacaggaatccattgttgtttagattcagttaaaatataatgcgttgtatctaaagcacgtgttaataacgatgtaaaagctacatcgatgtcaatgttattttctcttactttttcacctgctctagtcgcttcattaataccttgttcagataaattaacatcttcccatccagtaaataagtttttagcattccactcgctttgtccatgacgacataaaattaattttggcataacttataacctctttcctttaatctttaggacgttatttcagggatattttaagatgatttaatcttagcaattttcttttcaatatgttttaaaattcaatgattaaatcaattatcactagacattaaatacataaatcctattccccattttcattttttaattcataaatgaatcaataaccacctaataacaaatcatattatacacctttgtccgtcatttttctaaggtttaaaaaatatttttaggtgcgcctaaaaataaatgtaataaaaacgcctcctcagatatttatatatctatgaagacgtttaaatacattatagatggtctggttctgggtgaacgtatactgaggaaataccttttttgtgcaaatgatgttcgacattatcacaaatttgatgcgcttctactaaggaaaggttagcatctacaacaattgtgacatcaataaacacactacttccatggtaacgccctttaatacttttaacttcttgtacttcatcaacttctaaaatatcattgcgatacgcttctaattcagtttcattgaaaccatcactcaacataaaaattgcttctttaaaaataccaaaaccagtataaacgattagtaagcctagcaatgttgctaaaataatatcgacaattgggaaaccgatttgcgtaaaaattaatcctatcgccgttccaatgctgactaaactatctgataaattatctttggcagcagaatttaaagaactacttttcgttcttttcgctagtctttgattgactgcaaatacaatcaacattacaagaccactgattaagctgacgataattgttattgcgttaggtacaacgtcatcttctttgaacaaacgaggtgcattttgaataactacttggatacctacaaacataatgacaaatgacaccaataatgaagaaatattttcagacttcaaatggccgtaaggatgatttcgatcggcaggtttaattgaaattttcaatccaataataacagctaaagaaacgataatatctgtcatattgtttaatgcgtcagctcttacagctgcagagttaaagacaaaacccgtgacatacttaacaatagataagattatatatacaatcaaactcaaataagcaccgcgttgcgccaatttaagattttcattatgagacatgcgttgaaccaccttgaattagtatagtaacaatattatgaatgatttattttaaatttacaacgtttttaatttttataaatttttataaaattaaactaatttattcattcgcaacccctaaaaatattttttagcctttctgcgaattttatgagctagaaaggcttatgcattagtagcgaagctatctaatgcgttcctttattttctgcggattttatgagctagaaaggcttatgcagttgactttttacgtccaactgcgttcctccgtcttcttcaaatttatttgttagaaaggcgcccaactctccctgtttgttaactttcgtctcgaaagtttctatgttgggaccctatgcatgagttgcgaagctatctaatgtcttgacctaattatatagaagaaaaagtgcatcagtgacaaatcaaatgagatttctactctaccaaactctcttcgaaagacaattttctcctctatttattagcaaactattgcatttctccatatagtactttcttacttaaaatacgctgaatgttctgaattaaacgcttttttacatagttaacactagttaatctattagttaacattagttaataattagttaatttccatttgtattctcatgtgataaattctaaaagcatacaataaatttaatatgtaaaaagaaagggaatacacatgaaaaataaatatatctcgaagttgctagttggggcagcaacaattactttagctacaatgatttcaaatggggaagcaaaagcgagtgaaaacacgcaacaaacttcaactaagcaccaaacaactcaaaacaactacgtaacagatcaacaaaaagctttttatcaagtattacatctaaaaggtatcacagaagaacaacgtaaccaatacatcaaaacattacgcgaacacccagaacgtgcacaagaagtattctctgaatcacttaaagacagcaagaacccagaccgacgtgttgcacaacaaaacgctttttacaatgttcttaaaaatgataacttaactgaacaagaaaaaaataattacattgcacaaattaaagaaaaccctgatagaagccaacaagtttgggtagaatcagtacaatcttctaaagctaaagaacgtcaaaatattgaaaatgcggataaagcaattaaagatttccaagataacaaagcaccacacgataaatcagcagcatatgaagctaactcaaaattacctaaagatttacgtgataaaaataaccgctttgtagaaaaagtttcaattgaaaaagcaatcgttcgtcatgatgagcgtgtgaaatcagcaaatgatgcaatctcaaaattaaatgaaaaagattcaattgaaaacagacgtttagcacaacgtgaagttaataaagcacctatggatgtacaaaagcatttacagaaacaattagacgcattagtagctcaaaaagatgctgaaaagaaagtggcgccaaaagttgaggctcctcaaattcaatcaccacaaattgaaaaacctaaagcagaatcaccaaaagttgaagtccctcaaattcaatcaccaaaagttgaggttcctcaatctaaattattaggttactaccaatcattaaaagattcatttaactatggttacaagtatttaacagatacttataaaagctataaagaaaaatatgatacagcaaagtactactataataaatattaccaatataaaggtttgattgataaaacagttttaacaactatcggtagtggctatggttcatacattaaacctcttgaagtaagcaaagaaagcgggaacttagctaaatcatatgcacaagtaagaaactatgtaactgagtcaatcaacactggtaaagtgttatacgcattctaccaaaaaccagaattagtaaaaacagctattaaagctcaagaaacagcaacaactttcaaaaacgctttaacaggcatattcaaatcattctggaaataatcaatcaaaaatatcttctctagttttacatcattatttaaataattttcgtaaaaaaccgtgattaaaaagaaccgttgattctcaatcgaatctgcggttcttttttcattctccatcaattaaatgtttcttcgctatttgtcagctcacttttttacctgcaacttgttaaataatccttacatcgttaacgaatagttcatcatttagttgaatcagctcaactttattaacttcaaattttcacaaactattgcacaatccattcctctaccacttcaagcaccttaattaaacattaattcaatagaataagacttgcaaaacatagttatgtagctatataaacgcctgcgaccaataaatcttttaaacataacataatgctaaaacatcatttaacaatgctaaaaatgtctcttcaatacatgttgatagtaattaacttttaacgaatagttaattcgaaaacgcttacaaatagattattatatatatgaacttaaaattaaatagaaagaaagtgatttctatgattaaaaataaaatattaacagcaactttagcagttggtttaatcgcccctttagccaatccatttatagaaatttctaaagcagaaaataagatagaagatatcggccaaggtgcagaaatcatcaaaagaacacaagacattactagcaaacgattagctataactcaaaacattcaatttgattttgtaaaagataaaaaatataacaaagatgccctagttgttaagatgcaaggcttcatcagctctagaacaacatattcagacttaaaaaaatatccatatattaaaagaatgatatggccatttcaatataatatcagtttgaaaacgaaagactctaatgttgatttaatcaattatcttcctaaaaataaaattgattcagcagatgttagtcagaaattaggctataatatcggcggaaacttccaatcagcgccatcaatcggaggcagtggctcattcaactactctaaaacaattagttataatcaaaaaaactatgttactgaagtagaaagtcagaactctaaaggtgttaaatggggagtgaaagcaaattcattcgttacaccgaatggtcaagtatctgcatatgatcaatacttatttgcacaagacccaactggtccagcagcaagagactatttcgtcccagataatcaactacctcctttaattcaaagtggctttaatccatcatttattacaacattgtcacacgaaaaaggtaaaggtgataaaagcgagtttgaaatcacttacggcagaaacatggatgctacatatgcatacgtgacaagacatcgtttagccgttgatagaaaacatgatgcttttaaaaaccgaaacgttacagttaaatatgaagtgaactggaaaacacatgaagtaaaaattaaaagcatcacacctaagtaaacagttcaatcattttataaaatcctgggacacttcatacttgtctcaggattttttaacatattgaatcagcctcataacattaaattattttatcgtacaactgatttttataagagcaaagtatcgcatcatagtagatacacaaataataaaaatgaaacaatttaacttgaaagcttaaataaatattctcaagttaataaataattaacttttagatggattcatcaaaaatcgcaaaaaagaacaatttgtattttacaaacattaattaaaaataaaagcaagacattcgtgcaatcggttgccttaaaatgtttacaactgtcaacaataccaaggttttattaactatatttctcacaaaattagcttttagcattccaaacaaaaaaggttaaattgaacggaattatggcatttttaacttaattgtaaaaaaagttgataatggtcaattgttaatgaacagttaattataataacgtccaaaatatattattatttaattaagttaaataaaattatagaaagaaagtgaaaattatgcttaaaaataaaatattagctacaactttatctgtaagcttacttgcccctcttgccaatccgttattagaaaatgctaaagctgccaatgatactgaagacatcggtaaaggaaacgatgtagaaattatcaaaaggacagaagataaaacaagtaataaatggggcgtgactcaaaatatccaattcgactttgtgaaggataaaaaatataacaaagatgctttgatcttaaagatgcaaggattcattagctctcgaacaacatattataactataaaaatacaaatcatattaaatctatgcgttggccattccaatataatattggtttgaaaacaaatgataaatatgtttctttaatcaattatttaccgaaaaataaaattgaatctacaaacgtaagtcagacattaggatacaatattggtggtaatttccaatcagccccatcacttggtggtaatggatcatttaactattctaaatcgattagctatacacaacaaaattatgtaagtgaagtagaacaacaaaactcaaaaagtgttttatggggcgtcaaagcgaattcattcgccactgaatcaggtcaaaaatcagcatttgatagcgatttatttgtaggctacaaacctcatagtaaagatcctagagattatttcgttccagacagcgagttaccacctcttgtacaaagtggatttaacccttcatttatcgcaacagtatctcacgaaaaaggttcaagcgacacgagcgaatttgaaatcacttatggaagaaatatggatgtcactcatgccattaaaagatcaacacattatggcaacagttatttagatggtcacagagtccataatgcatttaaaaatagaaactacactgtgaaatatgaagtcaattggaagactcacgaaatcaaagtgaaaggacagaattgatatgaacatgaataaattagtcaaatcatccgttgctacgtctatggcattattattactttctaatactgcaaatgctgaaggcaaaatcacaccagttagcgtcaaaaaagtagatgataaagttactttatacaaaactacagctacagcagattcagataaattcaaaatttcacagattttaacattcaatttcatcaaagataaaagttatgataaagatactttagtgcttaaagctgcaggtaatattaactcaggttatgaaagaccaaatcctaaagactacgacttttcaaaaatatattggggtgcaaaatacaatgtgtctatcagttcacaatctaatgattcggttaatgtagtagactatgcacctaaaaatcaaaatgaagaatttcaagttcaaaacactttaggctatacatttggtggtgacatcagtatctctaatggtttatctggcggacttaacggaaacactgctttttctgaaacaattaattataaacaagaaagttacagaacaacattaagtcgcaacacaaattataaaaatgtcggttggggtgtagaagcacataaaattatgaataatggttggggaccttatggacgagatagcttccacccaacatatggtaatgaactcttcttagctggcagacaaagcagtgcatacgctggccaaaacttcatagcgcaacaccaaatgccattattatctagaagtaacttcaatccagaatttttaagcgtactatcacacagacaagatggcgctaaaaaatctaaaattacagtaacttatcaacgtgaaatggatttataccaaattcgttggaatggcttctactgggcaggcgcgaattataaaaactttaaaactagaacatttaaatcaacatatgaaattgattgggaaaatcacaaagtgaaattgttagatacaaaagaaactgaaaacaataaataactagtaaaacacggtcgccaacagtaattgtgacgaccgtgttttgatttattatcttagtaagactgccattctttttctcaatatgagatataaaggaatagctacaattaaagtgaatattacgcctggaatcgcgtttaataacacgacccacacaggtaaatttaaaatgaccgatagtatcaatcttgataccaaactgcctaatacacttgctaaaactaatgatagtacatttattttcaataaataaacaactgcaatagctataactctaaatataatagaaataatcacattaatcggattaaatacgccaaatactagtaataataggctagataataatccacctaaaaagtactttttaattccaaagaaagctaatatcaataatgctgctggtgcagataattgaaaatctaatcctggtataatggatggtattttcaaaactgccaaaatggttaaaatcgcagcaatgacactaatttgagtaatatcttttgatgtcatactaaaacccctataccgtttcataaacaacttgcttcggtgtgctttctaaaaatgatatgtaatgatttaaatcaatacgatcgtccacaaatattattctgcctccatatctcgtattaactggtttaatatcaaataatcgatggtaaccaattttagcagaggcaaaataacctgtcgtatacgttaagtcatcggacacgcaaagttctcctttgacatacggatgcgcattgatacaactagcaattgctaaggcatcagtcactctttcattaagatcacctttattatttatatcttcaaacgaaaaatgtgttgccctaatccccctatgtccaaatgaatctaaacgtttaccagatatagcagatagaataatagctcctgtataaaccgtttcatttttaatatatgtcatcccttgatttagcgcttgttcagtgacaccacatttttgtgttaaatgttggagattcgctttatcatcctcaataatttgtaatgcttttatttgtttaatcggttccataattttttgtatttttatattgagaaaatccggttgcccattttcatgaaaaaaacctttattataaaacctttgtaccgtctgttctattttgtcaaactcacaaatcgtttcagcaccactaatatgaatatcttgattgctagaacgcatttttatactatacatgacgatcacctcaatcttcttgatgcaaaatttcaaacaacctatctatatcttgttcagtatgaaaatacgataatgatattcttaacattggcttagtcacagttggataccttaaataacttgtaaacacatgatgctttaataatgtttgatgaatgttctcagccgcttctatgtcatcaaactcaataaacttaatcggcgagtttgaactattataattaacattgagtgcttttaacttttggttaaaatatttactcaagctatttaatttagtgcgtctatcatcagcatttattaacttttcaatatttctttttataaaatacaaattataaattggcaaactacttgagtagatgagtggtctaccgtgattaattaacatatccttcacatcatttgaacttaaaatcacacccccgtatgcaccacatgctttagataaactagaagtgagtatatctatgccttgataattcgagtaattctctattccaaaactatgtgaaacatcgagtatcagtgttgcgttatatttatgctttaatgagactaattgaccaatatccacaacgtcgccattcgttgaaaatacactatcagatatgattattttttgtatattttgattagggtattccgctaaccttttttctaaatcagcaatatctaaatgcttatatatcactttttctaaaccacttagcttaataccgtcaataatactcgcatgattttcttgatctgaaaatacgacacaatttgtatttttgaaaatattaaataacgccaaattagcatcataaccactatttaagatagtacatgcactatatccgagccagcctgctaacattgattcaatctcttcataaactgtcgaacttccactaatcaatcttgaacttgataagtgataactatacttccgcataaaactttcgaaatcatccttatcaaacgctatttgacctaatcctaaataatcattagatgtatagttcgtacatcgcttattttctacttcaatatactgtctatctatataccctaccgatttaagcgaccgatataaccctttctgttgtaataaatcaatttgctcttgaaacatcattcttgttttccttattttcacaagtgtcataatcaatttcaaagcccaaatcattaatcatatcgtagtctaattggttcggttgcccaccagtaattagataatcaccgacaaatattgaattcgccgcttttaatgctaatggctgtaacgaacgtaagttgacctctcttcctccagcaatacgaatttctttcgtaggattgattaatcggaataatgctacgattcttaaacatttcattggtgttaaatcatccatgcttccaaactttgtacctttgattggatgcaaaaaattaatcggaatactgtcggcatccatttctttcaaagcaaatgccatatcaacaatatcttgattagattctcccataccacaaatcacgccagaacatggtgatatattattcgctttcattagttctatcgtatctgttctatctttataactatgcgttgtcacgacgttatcatggtaattttcacttgtattaatattatggttatatctgtctacaccagctgacttaagtttcttagcttgttcgtcattcgttaatcctaaacatgcacatattttcagttgcgggtgttgagatttaatcgttcttacagtgttactaatatgatcaacttctttatcgctcggtcctctaccactcataacaatacaatatgttccaatatgattatcatgtgccacctttgctccatcaataatttgttcctctggaattagagcatatcgctgtttttgtttaatttctcgtgattgtccacaatacccacaattctcaggacatataccacttttagcatttaaaatcatgtttaattttacttttttaccgaaataatgttttcttaaaatatacgcctcatttaataaatctaaggtatcaatattagtatcctcataaattttcaatacagtctcttttgttaattgttccccttgtaatatgcgtttagccaaattcatattaacacttcctatctaaaatgttatgtactgcctttttaaaaatacgtaccatcgtttttacttctttatttgacatacttaacactggcacaaacgtaatgacattttctaaatttctaatcattagcccgttttctttacaattacgtacaatacgttctactttttcaatttctaacggcgttttactatctttatctgtaactaattcaactccaaacattaagcctcgtcctcttacatcaccaacatttcgatgacgcttcagcgcatgtaactgtttctcaagtgttgatgatgtcgtttcaatttgtgacaataacttacgtttttcataaagtcttatattttctaatgcaaccgtacaaacgatttgatttccggtgtatgtatgaccatggaaaaaggtattcacaccatgcgaatcacttaaaaatgcattgtatattttttgagatgtcaatgtagctgcaagtggtaagtagccacctgtaatcgccttacctaaacacataatatccggttgaacatcttcatgattgcatgcaaacatctttccagttctcccaaaaccaactgctacctcatcacaaattaataagacatcgtattttttgcacaatttctcgacttctttcaaaaagcctttaggatgaacaaacaagcctgtcgcaccttgaatcaacggttccaatataaaccctgcgatttcatcatttctttcaattagaatttgctctatattcgttaaaatagctgtcatcatttcattttcagtatcgtaattactgcgatagaaagatgggctttctacttgaatattttcaaatattaagtctttaaatattttatgaaaggtcttgataccaccaacacttaccgcaccaatcgtatccccatgataaccgtgatttagcgttataaacttgtttttcttggcatatttttctctatcaatatttttccaatactgatatgccatctttattgcgatttcaacagacgcactgcctgtatcagaataaaatacttttcttagattacttggcgtgatttcgattaatttttccgcaagttctattgacggaatatttgatgatcctagcagcgtagaatgggcaattttattgagttgctttttaattaccttattcaagtatttgttattatgaccatgcacattgacccacaacgatgcataaccatctaaatatttattgccattcgtatcgtaaaggtaactaccctttcctttttcaatgatgattgcttcttctttgctatatacacccatttgtgtaaatggatgccaaacatattctgagtctttttgtttaagttgttgtgtgtaattcatttttaactcctattaattgttttaaaaatgcttctgagaaattttcatacgtggcatgttcttcaaatgtatagactgttttatttgttaattttccaatcgtaatttgattgtctttttcaatatagctgcctgtatagcgattcattattaaaaaattactcgccgatacattctgattaacataatcttggtgaacaatggcatcgctaatagcacctaattttgatggcaacacactgatgacacaatctgcacaatcattgattagatctttagtcatgtagaaatcatctgtaccttcatatattggtacggcaattcccccagcaccctcaattaagataaaatcaaattccttatctaaaacttttaccttatctaatacacactgcttatttagaaaaatttgatttgccattttaaatgcaaggtgtggtgatacaggttgcttaaaagtataaagtgacgttatgtcatagcttaaatcacattcatttttaaatacttctaaatctggaaatgtcccgtcttggcgttcctcagtttgaaatggtttaaaaatacaaactcgatgaccacgtgttttcaaagcatggtataaatgctttgtaacataggttttgcctacatcagtattcgtacttgtaataaaaatcctcataaaaaataagcacctcaatccgaatgtaaacttttataattaataagtttacatttaaggcgcgtgtttttcaagaaaacatgaatttaaacttctcagtataactataaattttagcaaaattttgaccttgctattgaaatgactaaggcttcatacggaattcgggcagatataaacagcgattcgataaaatatgtcagttaaaattaataattgcattatttcttaataaaaagacatcctagctttaccatgttgtgaaacaatccattaattgtaatattacgttgagcgccttgttcatcaatgctataattagttacataataaattgaacatctaaatacaccaaatcccctcactattgccctagtgaggggatttattttgctgttgattatctatcaccctttttatttccaaattctgattccatattaaactattatttataatttccagcctgctgatttactttttattcttataaagtcttgatacattcctggttttcgaattaattcatcatgactacctttttgaattatttcaccttcattgagcactataatctgatctgcatttttaatagtttcaagtttatgtgcaattgtaattactgttttgcctttacttaattcattaattgccgtttgaatcagctgttcattttcagggtcaatacttgcagttgcttcatctaaaataattattggtgcatcttttaatatcgccctagcaatagaaatcctttgcttttctccgccagataaattactacctttttcatttagcattgtttgatatccctcaggtaatgacatgatgaagtcgtggcaacatgcttgcttcgctgcacgaataatttcttctttcgttgcacctggatcgccaaacaatatgttattttcaatcgtatcattaaataaatacaccttttgaaatactgcactaattttcgacattaacgtacttaatgtcatatctttaatatcaacaccatcgatgcgaatatttccatcatcgatatcataaaagcgcaagagtaagtgacataatgtagatttcccacttcctgaaggtccaattattgctgttgatgtttgtgtaggtatctcaaaattcacattctttatcacttgtttatcatcatatgaaaaattcacgttttgaaaagcgatattttcatttttaatcgtcaaattttttccattctcatccagttctggagcattttttatcttttcaatatcatctatcgtcatatctatcatttcaagtacgtgtgcagcactattaatattttcaacactatcaaatatcacaaatgaaaaaattgaaatcataataagggtaggtaaatcaatactatgattcatatataataagcatgcaactaatacaatcattattgaaacaacttttaaactaagtaaatgcaataaattgaatgggataaattgcatttctatttttgtatttatacgtttacttccattgactgcttggttaaaacttttaagactcgtattttctttcgcgaatgattttattacttgaataccacgaataacctccaataccttttccactaattggttttgtacattatgatacgctggcgcattttgtcgactctttctttctaataattgaatcgcaaaaaatgatagtaatacgccaatgcatgctaataatgatacttgccacgaaactacaagtagagacaatatgagtactgtaattaatatgtatccattaacaacaacgtccaccattttcatagcaaagttttctaaaaaggttaaatctgttgttactattgttgttaactcatttgaatgatgcgaattaaaataacctaaccttacatttttcaatttatcccctatatctaaacgttctttcgcactcatttcataagcgatgctctcatggcttttgcttttgaaatatgctgtaataaatcgtccaatcactaataaaaccatgataattacaacattcaatatatctttcatataaataggtttatgagatagcacattattaaatatttttgcaactaaaaagataggtaacgcaataaaaatagcatttaaaaatgacatgctaaatcctaaaatcattcttgctttatatggtcttatccagtttaaaattttaaatgtaatttgaaacatatttgacctccttttctcattagtttaattatgtccagtattgattccccaatcttttgtatgcatgtgcgtatcccacattttcttataattaccgtttaattttagcaataagtgatgtgaccctttttctaaaatttgttgtttacctaaaacaataatttgatctgcatgttgaatcgtagataaccgatgtgcaataacaatcaatgttttatcctgcgtcaacacatttaatgcttcttgaattttttgttcgttgtctggatcaacgtaagcagtcgcttcatctaatacaatgataggcgcatcttttaatatcattcttgcaatagtgactcgttgtttttcaccaccagacaatttatctcccactgtaccaacattcgtatcatatccatctggcaacttttcaataaattcatgacattgtgctaacttggcagctttttcaactgcctcatccgtagcttctggattgccaagtttaatattttctttaaaagtaagatttaataaaaagttatcttgtccaacaaaaccaactaaatcgttaagttgtttcgattcaatatcttttatatctataccgccaatcgtaatttcacctgaagtcacatcccagtatcgtgatataagcttggcaatggttgacttaccgctaccagatgccccgacgatagctatgaaattattttctggtactgtaaatgataaatgcttaaagaccagatcgtccttatctttgttatatgaaaatccaacattattaaaagcaatttcataatgttgaggcttcttaaattttgttgacaatactaactcttctagacttaatatttgattcacttcagttaatgcgtattgtatagactttaaatgatttacataattagtaaaattcttaatcggtgctactacacctaaagataatacgatgcataggaaaaattccgcatagtttaattggttaatagatatcaaatacatgccgaccggtaaaatccctaaaaatgttgaaggtaatacactagctcctaaattcatatacccccatgtatttttaaaccaattcaaagtgtgaatcttataattatctactgcatctttatattttttatatgaactttgagattgattaaatgttttaatcacttcaatgccttcgataaactctacaatcgcgctattcatataattattcgatttcatttgttcagcatatgtctcattaaatccagacataacttttttaaaagcgaaaattgaaattggtatcgttactaataaggcactagccatacgccaatcaatgagcattatgtataaaaagatagcagctgacaaaagtaagtttcctataacttcaggaatcatatgtgctaaaggtaattctattgtttcaaccttatcgacaaatatattttttaattcacctattttcttagattccactacgcctaaagggagacgcattaatttttgagctaattttttacgaatttcagataaaatttcatatgccgtaatatgtgatagcatcgttgacgctccaaaacaacacacttgtgaaatataagcgattaaaacaataaagatataaaccataatcgaattaatcgtatatgcattgttaatcatcattaaaataattttaaagactgcccaatatggaactaatccagaaaagacactgatgatagacaacaaaattgataacataattttccatttactatcagaagcaaatccgctgagtatctttatccaatttgtctgattgttcatcgtatatgtaactcctttcaattaataatctaaattaagccgcttatattatttatttcactggatgatatacataatataaatttgttatttgttaaaaattaatacttattacaagtacatcatatattagttgataacgattatcaatgtcgcgtggatttgtgacacatttcttttaaaaattcacaaggttatggggcagaaatgataaagagccactaatgatttattatgtaatgattctttatccttagccacagctaatatgtacttaaaaataggaatacatgagtaaaactctgtgttggggccccgccaacttgcattgtctgtagaaactgtggatccaatttctctatgttgggtccctgagtatagccttgtagagtctagtacattgatttgtatcccaatgtccctataattgattattcgctttatctaatgatcctatgactcaactattaaatcatttttcgaaatacttaattctaatgtaattaaatccatttattgtaatattgcgaaaatacattgcacaccttgttcatcaatgctataattagttacataataaattgaacatctaaatacaccaaatcccctcactactgccatagtgaggggatttatttaggtgttggttatttgtcaccttttttattgttgcgcgttcgtaaccaatgtgcaaaaaacgcaacaagacagccgcttaaagctgaagtcatgatttcaattaataaattgaacatccgtcatacacctcctctctgcgttaaagtaacgcccgagatgttaggcgaccattatattatatcatttatttattatatttcacgcaatattaagacccttccaaagtattttttagtggtttacgctactttaattactatcttttaaaatccatttagataatataaatgtgatgggtatcgtaataattaaaccagcaaatggtgcaatttctgctggcaaatttagccaggatacaaatacatataataaaactgtttgtaagcttatgttgacaatctgcgtaattggaaaactaatgaattttctccaagtaggttttaccctgtaaacaaaataacaattcaaataatacgaaatcacaaaagcgactataaatccggtaatatgactaatcatatattcaatgtgtaataattttaacagcaataaatagacaacataatagtttaacgtattaatgccgccaacaatgataaattttaaaatttcagcatgcgtttgtgttagtttcatatgtgtaactcctcaacatcaaaatatatgtataactgcgttctccaacatactcgaatatgcgagccaatccgcttctcttcaaatatacttatttcagtttttataccctttcacagcaaatttagtctctttcccctcatccttatacgccattataatgtaactgatttatcgcgcgactcattagcactatagagattactttagttcactagtaattttatatacaataagagcgacaacagtaatgagaggatgtctactatgcaattacaaaaaattgtcatcgctcctgactcatttaaggaaagtatgaccgcacagcaagttggcaatattataaaacaggcatttactaatgtttatgggaaaacccttcattatgatatcattccgatggctgatggtggtgaaggcaccacagatgctttaatgcatgcaacaggtgctactaagtatacagtcatcgttaatgaccctttaatgcgacctattgaagcatgttatgcacgcgcagacgaacaacaaattgcaattattgaaatggcagcagcgtcaggtttggatttattagaaaaagaggaacgtaatcctttatacacatcatcatatggtaccggtgaactaattaaagatgcattaaatcatggtgctaagaccattattttagggattggtggcagtgcaacaaatgatggtggtacaggtatgctaagtgcactaggcgtaaagtttactgatgtaaacggggacttattacaaatgaatggtgataatcttgctcacattgcacaaatcgatataaccaatctagattcgcgattaaaagaagtgacctttaaagtggcctgcgatgtttcaaatcctttattgggtgaaaatggtgctacctatatttatggtcctcaaaaaggcgctgatgcaaagatgataccaaagttggatttcgcaatgtcgcattatcatgataagataaaaatgtgcacaggaaagtcagttaatcaaataccaggttctggtgcagctggcggtatgggcgcagcattattagcgttttgtgagacaactttaacaaaaggtattgatgtcgtctttgacattacagattttcatcaaagaattaaagatgcagacctcgttattactggagaaggacgcatggattatcagaccatctttggtaaaacacccgtaggcgttgcgttagctgcaaaacaatatcatattcctgtcatcgcgatttgtggcagtctaggcgaaaattatcaacatgtttacgatttcggtattgatagtgcctattctataatctcttcacctagcactttagaagatgtcctacaaaatagcgaacaaaatttattaaacactgcaactgacattgctcgtattctgaaattacaataatgtcaaagtaaatcatcagctttattatttgcagttaaaacttgaatgaggtgaaacccatgaaaagaactgataaataccgtgattcatatcaatacgacaatcaaaatcaaaatcatcgtcgtcaatctgaagacgcatcgtatagacaacaatatgctaaaggtgatcctgaagaacacccagaacgatactataacggtagagattatcgaagagaacaaattcttgaagaagaaaacgagaaatcccgccgttcaaaaaaatggttatatatcattattgccattctcttaattattgtcgctatttttgtcacacgcgccttacttaacaatgatagcgataaagttagtaatgaccctaaagtctctcaaaattataaaaaacaagttgaaaatcaagacggccaaattaaccagcaagtcgataatgctaaagaaaatattaaaaacaaccaaaaaactgatgacattattaaaaatttacaaaatcaaatcgataacttgaagcagcaagaacaaaacaaagctgattctaagctaactcaattttatcaagaccaaatcaacaaattgacagaggcaaataatgcacttaaaaacaatgcaagccaaggtaaaattgaaagcatgttaaatgatattaatacaaaattcgacagtattaaatctaaattagaaagcttatttaaagatgacaatggtggcgctaattaattattaaacctgcttttgatgataaacattaattccctatactttatctgtatcactacgttattcgtgatgatgcattaagagtatagggattttttatataaacttgtattctaactacatacaaatacacacaaaacgtatataatttatataattatataaattaaggagtctgtttatgcaatcttcgaaaaccaaaacgaagcatttttcatttttattgctaatcacgttaggtgtcatgaccgcttttggccctctaactatagatatgtacgtaccatcattacctaaagtgcaaggtgattttggttctactacatcagaaattcaattaacattatcattcacaatgattggtcttgcactaggccaatttatctttggacctttatccgatgcttttggtcgcaaacgtattgctgtatccattttaatcattttcattttggcatcaggtttgtctatgtttgttgatcaattgccattattcttaactttacgatttattcaaggtttgacaggtggtggcgtcatcgttattgccaaagcctctgctggtgataaatttagtggcaacgcactcgctaaatttttagcatctttaatggtagttaatggcatcatcactattcttgcaccattagccggtggattagctttatccgtagcaacatggcgttctatttttacaattttaacaattgtggcactcatcattttaattggcgtcgcttctcaattacctaaaacacctaaagaagaattaaagcaggtgaattttagtagcgtcattaaagactttggaagtcttttgaaaaaaccagcatttattattccaatgctattacaaggtttaacttatgtaatgctatttagttattcatctgcatcgccatttattactcaaaaattgtataatatgacaccccaacaatttagtatcatgtttgctgttaacggtgtaggtttaatcattgtcagtcaagtcgttgctttattagtagaaaaattacatcgtcacatattattaatcattttaactattatacaagtggtaggtgttgctttaattatcctgacacttacattccatttaccactttgggtcttactcatcgcattcttcttaaatgtgtgtcctgtgacgtcaattggaccgcttggtttcacaatggctatggaagaacgaacaggtggcagtggtaacgcatcaagtttacttggcttattccaatttatcttaggtggcgctgttgcaccattagttggcttaaaaggcgaatttaatacatcaccatatatgattattatcttcattacagccattctattagtcagtctacaaatcatttactttaaaatgattaaaaagcaacatgtcgcataacacttcaacataattagaaccctagcaaagatatctatctttgtcagggttcttctttatgaattatgagattgaatcttcaactaaaattacgccttcatatcaagtacatttctattcaatcaccctttaacaggcatccaaatttctgtaatatatttttcacttgtagtatcaccatcctgatacaactcaaaaaatggtgctgattttaccgtatctgcttgatattgatgtatgtagtgatgaacctcttccattttttgttgaactgctttaggtactgctccctgtgcttcaaataccatatactttgaacttgctaatgttatgacatcatatttttcaatatcagcactattatctccggtaactgcaatcgtatatgacatcttaccatctaattcaggtatacataagccaagtatcccggctaaatcaccattattttttaactgtaaatctgcaattactccctcttgataacatctttgccaaaaccctgctatatgttgctgagcctgtcgtccattttcatacgtttctttaatacctactaacgttaacgacgcaagttgttgtaattgatattccattttatcactccattaattttattcactcatgtaaaacatatgtttaggacattttgcattgacgctatataattatattaaatatttattgaatcaatgcgaggactatattatgaaccgaaaaatattaccagttaaacctatcagtcagctatttcctattcctatggtcatggggtgtgaaggtgtttccgcagccatgatgttgcaatacaataaccaacatatccctgctacagaaattatgagacattggccgacacatccgaacaatccacataaaggttatgttggacatcacttattcattaagcttggcaattatcatcaaacaatatttccagatgcatatgtaccatttttacaaaaatacaatcctaatatcgtagacggcactggtaaatccttagaagatcttaaaggtattatcgatcaaggtcaacctgtgttaatataccatactaatcttggttctaaaccattactacgtgttttccgctttgataacaagccagcgaaacaagtttcaaatattcacgtaacgttactcattgggtacgatgattactattactattatatcgatccactttggagtcatattcgtcgtggcctagttttacctaccatcattccaaatcgcaaacaaattattaaaattcgtaaagagaaaatggaatacagctttaattcaccaggaagaaagtgcatttatgtgcaaccacattcatatacaattgaaaatcagaaacaaaataaacacacgtaagtaaacacattactcgcgtgtgtaaaacataaaatgcgcaaactgggtcaggtttgcgcattttaaatttctattatttgtatcgtctcatttatttcctggtaaatatcttctgaacgccattgtcttggatagcctagacacggacagagataacatctgccatcatccatcacacttttccgaaaatgaacatggcccataatactatatggtatatcgaacatcgcatacaaaggattgaaatcacttgtcccaataaatgcattataaaaatcgaatatacgatgcggcataggaacaatgaaatcagggtgcgtcacaacatgtgtgactaaaatcactcttctatttcctacttctaatagatctttcttcacttgttcagccgctattttagataaattttgatctgatgtgccccaagatattcgttctttatcttgccaagtcgcaccataatgttttcctctttgtaactcatctaatgaaaatcgttgtgctgcaaagctataatcataccaacctgtatgtcctatgattgcccattcttcatttactataaatggttttcctaccaagcactgtgacatactcttataattattccaaatgtcttgcgtagtcatactttcaacttcccataaatcatggtttccaggaacaaatttcacaggtatatctaattgttttgtcaattgcgttataaattggtgcgtcaattgataatgatttgagatatcccccgcaatcaacaatatatccaaatttttatacttaactatttcaaccaatgcctctaagtaatcttcggatgtttttttattatgacgatcaatatgtaaatcggcgattgtccctatcttcatacccataccttctttactcaaattaaaatgttatttattatgccatagcttatctaatatatatagttaactgcttcatttagatgattattttatatttttgcataaaaacttatatcttttcgaaaaatcgataagttttagttatcatacccttaactatcaaatgttttttcttatatttaaaaaaataattgctttattaaatggatttctttagtatttataattaagaaaacgattacacacaacttttttatttgctttatcctgaggaggaaaattatggcaagaaaattgcatagagagttgaataacagacacatccaattgatagcaattgggggcgcaattggaactgggttattcctaggatcaggtcaaacaatatccttaactggtccatcactgttattcacatacatgattattggggttgtactattcgcttttatgcgcgcattaggcgaattgttgttgagcaatacaagatttaattcatttgttgatattgcaaatgaatatttaggcccttttggtggctttgtcattggctggacttactggctatgttggattgtatcaagtatgtcagacctaactgcgatgggacaatactttgcattttggtatccacaagtcccaaattggattaccgtgctatttattgttttaatcttgattagcttcaacttattaggtgccagattatttggtgaactggagttttggttctctattattaaagttgttacaattattgcgatggttatcgttggtcttgtattaatctttttctcatttaaaacacattatggacatgcatcattcacaaacttaatcagtcacggcggcatgttccctggagggacatttggtttcttaatgtcattccaaattgctgtatattcattcattggtattgaacttataggtgtaactgctggcgaaacgaaagatcctgaaaagactttaccgaaagcaattaataatgtacctatccgtattttattattctatatcggtggtctattagtaattatgtcagtcataccttggaatgatatcgatccaaatagtagccctttcgttaaactctttacattaatcggcgtgccatttgcagcaggtgtcgttaactttgtcgtgctaactgccgcggcctctgctacaaatagtggaatctattcgaatagtcgtatcttattcggactgtcacaacaagggttaggtcctaaagttttaaataaaacgaatagtcatggcgtgccttatttatcaatgttagtttcatcaattgcattacttatagcagccttgttaaactacatttttcctaatgcaattcaactattcatatacgttacaacgttatcaactgtgttgtttttagttgtttgggcaatgattattgtcgcttatctaatgtatttgaaaaagcatcctgaggcacataaaaacagtaaatttaagttgattggtggtaagcctattgcttacattattttagctttcttcttctttgtattcattttattattctttagtgacgaaacaagagcagctatttatatttcgccattctggtttatatttttatttttcttttataaaaaatacaaaacgaatgctgaaaagctcgcatatgaacaacgacaaaatgacagcggtcatttcagatatgacaatcaataatttaaacatctcgctctagtatcagttcaaccgatactagagtttttttgaaaataacttcattttatcaatatatctatgtcattatgccttaaaagtgataaaatattaactattaaaattttgaggagtattgtatggcactattagaagcatttttaatttttatttttgctgtgattattagttcggttatcaataatcgatttccacaaattcctactgcctttattcaaattgcattaggtgtcgttattttcattattccaatacaagttgatttccaattcaattctgaagtatttatgtttgccgttatcgcgccactactttttgtggaaggtacccacgtctctcgaacaaaattattagaatatcgcaaacctatactattaatgtcaatggcactagtgtttgcaactgtagtcggtgttggctattttatacattggatttggcctgccttaccaatgccagccgcttttgcaatagcagcaattttatgtcctactgatgcagtagcagtatctgctattacacgcggaaaattattacctaaaggttctatgacgattttagaaggtgaatctttactcaatgatgctgcaggtatcatttctttcaaaatcgctgttacagcattagtaactggtaccttttcattattccaagctattgaacaatttatcatttcaacaatactaggtgtacttattggtgcaattattggattcgttgtcgttagaatacgtatagacttaaccgctaataaaggtttaaaagataacaataccttaacttttattcaattattaactccttttgtcgtatactttttagcagaagaagttcatgcttcaggtatcattgcagttgtaatcgcaggtctaatccatggtttagaacgcgaccgtttaattagagcacaaacggaactacaaatgaattaccatcaaatttggaacacatttagttatgccttaaatggttttgtatttgttgtattaggttttatgattcctactgtagtcatagatattttccaaacagagcctgacaacttttcatttttaatagtgatcactatattaatcgctattgcaatttatgcatgtcgatttgtttgggtttatttctggtacaaagatttttatttcccgaaaaatatacaatcttatctagacgaggaacatgattcacatgaaacaccaccttctcgtgtgcgttacgcatttattatgacgatgtgtggtattcacggtacaatttcactttcaatggcacttacattgccgtttattattacacaagggcaagcttttgaataccgtaatgatctattgtttattgcatctttcatggtattaattagtttaattttagcgcaaattgttttacctttaattacaccatctgccgaagatactacttttaaaggtatgacttatcaatctgccaaaattttcattgttcaaaaagtgatccagcattttaaaaacgaaagtaaaaaagacaaaaacgatacaaattatcgcccagtattaaaccaatactatggagaattgttatttttattaaattcagaacctgataatcaaaatacaaaagaactcaaacgtttagaagatattgcaaaagtaatcgaaacatctacacttgagcgtttaatcgataaaggtaaggcaacataccaggatattaataattaccgcaatattgtcgaattaacagagacacaccgtactgcatcatttgttgaaaaatttgcaaacttcttcaagatgttatggcttagacttaaagcgatgaagcactacaaagccttaaacaaagaatctaagaagcaagaatttgaaaattcattcaaagatgttcaaaaaattatgcgtattgtgaatcacaatattattttacgcttaaaagaagaacaaaatagtacaaatgtacttgaggttagcttagtcattaatcattactatgatatgagtcgctcattaaagtggcgtgcacaacgtcgaaaagaacgtcaagaaaacagcaatcaaatcataccgcaagctatgttccataaccacaaattggaagcattgtacttacaacgtcatcttttagatgaattaattcgcaaaaataaaatcaacaatatcgttgcagctcaaattcgagaaaatatcaattacaacgaaattgtcttgtctttacagtccaaagattaagcaagacataacaacacccccgtacatatgagacaaagtcattatcatctcatatgtacggggtttttatagtcaacatcaaaaaatcggattgatgaaaagtaaataacctttcatcaatccgatttgattatagaatctattttttaagtttaaatggaattgtacatacgttaacattcttttgataaattaaatacaatttcatacgcaaactagtttgattgtgtaataaattatgccaacgtttcttagtaataaattctggtatcactactgtaatcatatagttttgatcgttggctttacgattaatcttatcgataaaacgtgaaattggtcgtataatactgcgatattccgagtgtaaaataactaatcttacatctgggaaatgacgtttccatttctcttggaatgctttttcatcttcatctccaaatgatacatgtactgcaataacatcattattcgcaagcatttgtgcgtaataaatagacttatcaactgcagttgtaatgcttgttatcggaacaattgctaaattacgatctactacttctacattatgaacatcaatatcagaacgtaattgttctgcgatatctcgataatgtttgttaattttcaagaagaaaatcaccacgaacggcaagaaaataagtatcggccaaacttggctaaatttagttatgagtaaaatcataaaaacaataaatgtcacgataccaccaagtaagttcacagacaacttacttaaccaattcttaggacgttcatgaatccatttaataaccataccgaattgtgctagtgtaaatggaatgaatacaccaaccgcatacaatggaattaaatcttcagtcataccatcaaatacaataattaaaataatggctaatacacctaaaataataatcgagttagagtagcctaagcgatcacctctaacagtaaacattctaggcatatatttatctttagacattgaagccgctaacatcggaaaagctgtaaatccagtgttggctgctaataccaaaatcatcacggtcgttgcctgtacaaaatagaaggcagcattatcaccaaatatttgcatagctaattgtgataaaactgtcgtttccgtttgtggcataattccataaacgtatgctaaaccaacgataccaactaataaaaacgctaaaattgaacccatagcaattaacgtttttacagcattattagcacttggttctctaaaattggttaccgcatttgaaatagcttcaacacctgttaatgatgaagcccctgatgaaaatgcttttaatagcaagaataatgttactccaggaaccgcagttcctactgatgcatgcatatgtggttgaatatcacctgtcgccacacggaaagtacctataaatattaatatcactaaccctataatgaaaagatatactggataggataatacggtggcagattcagttaaaccacgtaaatttaatattaaaataaaaagtacaagtaaacatgcaatcagtactttatgcccatataaacttgggaatgcagcaacaaatgcatcagcaccagatgatatactaacagcgacagtcagtatgtaatcgactaataatgagcctcctgcaagcaatccccatttttctcctaaattggtcttggacaccatatacgcgccgccacctttaggatatgcataaataatttgcctataagacataattaaagcagctaataagatcagaacagcacctgcaatcggtaaagtataccaagttgcaactgcacccactactgataatgtaatcagtatttgttcgggaccgtaagccactgaagataatgcatccgacgaaagaatcgctaaccctttaaacttcgatatcttttcgtcttttagttctctgttttttttaggttgccctataataagtcttttaaattgattgaacataatctcctattcctttttatactttttgatggatatcactatacgcctatccttccaaaaagtatagagagttaattaatattttttatgtaattatacacctattaacatataaggtgtcaaaaataatggtaaatatacctctttaattaatttattcaatagaactggtataataaaataaatctcattaggcacttaagtaaatttaacatataaaaaggaacgtttatgactactaaaaaactgtattttctatccatttctattatcattttagtcgccatttcaattgctatatatataacattaaatagcaatacgaagacacggttaaccaatgattcgcaacaacaaatagatacaattatcgaacatgatttacaaaagggacatattcctggagcatcaattttaatagtaaaaaatggcaaagtttttttaaataaaggttatggttatcaagatgttgataaaaaagtcaaagcttctcccacaacaaagtatgaaattgcttctaatacgaaagctttcacaggtcttgcaattttaaaattagctcaagaaggtcgattaaacttaaatgatgacgtatccaaacatgtgcctcattttaaaatgaactataatggtcaaaatgaaactattacgattaagcaacttttggctcaaacaagtggtatacctagtgatattacaagcgaagactccgtaacaaataaaaataatcgtttaaatgatgtaacccgtgcaattatgggtgatgaattacatcataagcccggagaagaatttgaatactcaaatatgaactatgatttattaggtttaattatccaaaacgttacgaagcaatcctatacaaaatatattacaaattcatggctcaagcctttgcatatgacacatacatcattcaaacaaaacaataacaaatcaaaacatgatgctattggctacgaattacaaggttcgacacctgtcgtctctaaacctgaatttaacctttgggatacaccatcagcatatatgatgacatcaactgaagatttggaacattggataaaattccaacttaatccacctgataaatacaaatcattagttcaacaatcacataaaaatttatcatcaacaattggtgaacctaatgccaatgcatatgcttccggctggtttactaataatgatgaacatttagtgtttcattcaggaacgctcgataacttttcatcatttattttactaaatccaaaacaaaattatggaattgttgtgcttgcaaatctaaattcggaatatgtacccaaattagttgagcatcttaacacacaaattgtaaatcacaagcgatattcgacagttgcgtctatgctcaatcaatataaagatcaatttaatattgttaccgttttgatgacaacacttattttattagcatttatattctcagcttatcgtgcttggcaaatgcgtcacgggaaaatcatcctgcgcaaatcaaaacttaccacatttttaagttggctaactttatgtttatgtatcgctatagcactcatattatatgcattaccatatctcattctcggtagcaataactggtcttttgtactgacttggctgccaatagaaattaaattaacgttaactacagcatttattgcattattcagtatgttaattacacttctgttaatattacatacaacgacaattaagaaaccataaaaaagacttgttcaatcgcacatcaatccgaaacatacatatttatgtatgaggattagcgatttgaacaagtcttcattattaacatgctatatgcagaaaccgattatttaattggattcatgccatctttccaagttttataaatcagagtaccaccttgcgctttaaacttctcattgcttacgccacgttcaaatggttgcgcaggttgaatatcaatatttggttcaacaccaagttgttctttataccattctgcaaattcagaacctttaacaggtgcatcatctgctacattatagataccattttcaaaatgaatagcttgaatagatgtttcaactgcatcatcaagatgcacaaatgatgttacgccatctgaaagtgtcacttgaccatccataaattgattataaatcatgccatcttttccgtaccaagtacctggaccatataaccagccaaaacgtaaaacaacgtattcatccatacgggccgtttcttcttctagaccaaccacaccatcaaccgttacttttctatctccagttgagttaaaatcaagtgaagtttcctcatttgctaatccttcgcccggttcatacataaaggcaatactttgggcaattactttcttaacatcatgctttttcgccgcatcaattaagtttttagaaccttcaatacgtactttcgtatttgctgccatatcaacattttttaaatccgtaatttggttgataatgatttctggtttaaaatctgctaacgcttgatcaatggtatcagcttttaatatatcaccaatatatgcttttacattaacagcagctagcttttgttgaccattctcagatgtagtaaaaccagcaacctcatgcccctcttcttttagtctttgaactaatttaatgccaataaggcccgttgcaccagttacaaaaattttactcattataaacaccttttctctatttgtcttttaatataattacttgcttgatgagtgtacaaaattcacgtaagacttccaaatgatttgcctcaatttttttcaaagtgtcgtcgtaaaaactgtctagcaaatgctagtagtatgtcgtagacctatgacaaatctgaattatgacgaagaccaatcaagaaaaacagcaccaagatcatttcaatttgaaagtactttactgctgttctttatttattacatttcaattttaataatgaccgtaatatcacgtgattgtcatttccttgcaatcacacctaaaaacactaattaatcctgtgcatgtcgctgactttctttagtatgaattaaatcagtaataaagcgattgactggtgcttcaatatgacgttgtttacctaatgttgcaactgcgccattaatataatcaatttcagtctttctattattaacaattaaatcttgatacatggatggataatgcgcaccaactttttcatttaaatcaactaaatattcaaatacttcatcaacatttaaatgaacattatcaatcgtcgctacatgcactatttcttgcgttaatttataaatcaaacacttcgcataactactttcattcagtgatgccatattacactccaacactgtgcttaatgcatttgccgtaccattaacacaaatctttttccaaatcgattggtataaatctttactaatgacaccattcaattccgcttcgttaagtaaatcagcaacttttataacattttctttaccttcatcaactagttcacctatttcaactggtccactaccaagtaaatgactgtgtccagggctttcaagacctgccgtccaagtcgtaacacctctgacaatttgtgattgagcaacatactgcgcaatgatttcttcatgcttcaaaccattcatcgtacatacgacaatcgtttcattatcaatatgtggcttcatagcttccatcacttcttttaattgcatagactttggaaatagaaagacaacatcgtaaatgctttcgtccggttgatcattaaaatgatacattggaatgtttaactcgaatgcctctccattaatcgttatatttaatccatgttgcttaaccgcttcaacatgagatgtatatccgtcaataagtgtgacatcatatcctgcttgaaatagtttggcaccaaagccactacctaatgcacccgatccagcaattgcaattttcatcctataaacccctcttcatcgttgttgttcatttttaaaatactactttcgcatattagcgtcaatttgaaaatcattcgcttaatatacacacagcttttatcgtctataaaagaacacacctaacattaaacgtcaatacgcaacattaagtgtgtatgataaacttactttcacaaaatttcctttaaaatccctacataataacttgctttcatttcagttttacaaattcgtttgatttttaggaactaatagtaaaatgactaaaaatgcaacaattgctagcaaggcattaaacatcatacctgtgaaaccacctaagttcaaatttaaattagctgctaacacagtataaaccgtaccagatactgctactccaaatgcatttcctaatgatgacgccattttatatacgcctgaagcaacacccgacttatcatctggcgcactagcaactgctgtatcagttgatggtgtagcatataatcctaaaccagtaccaaacaataaatatccaactatactagatacgatataccacatttctggtaaaaatgttaacgacaataagattaacccaatcactgtaaagccacttcctagtaatagtgggcgtttcggaccatgttgagataaaatcttttcacctacacgaatcatagacaacactgctattaaatacgttaatgaaatataacccgtttgcgaagaattaaatcctaattgttgttgataatacgtgttaatgacgataagtgcaccacctgctacaccatttaataagaagtttgaaatagttgcaccactgtatcctctatttttaaaaattgaaaaatcaacgagtgggtgctttattttattttcgtaatatacaaaaccaactaatgaacagataaacactacaattaaacctagaattaacggtgaaactaaaccaaaatgggacgtctgtgtaatgattacatttaaacttaacattgtcactactaaaatgactaacccgataacgtcaaactttttagcttctgctttcatacctttgattggttctgctttagtctcaggtgcatgtttgattaagtacattgctaataatgttaatagaattgaaacaacaaatattgaacgccaacctatatatgtagccattaagccaccaaacaacgtacaaataccactaccaccccaagaaccaatagaccaatagcttaaggcacgttgtcttcttgtaccaatataatattcgttaataatagcaagtgtggatggcataatacatgctgcagacaaaccttgaattattctacctataattaaaaatgctggcaaaggtgtaataatgatgagtaatgaacctacaacatttaatatcaatcctacataagtaattttgacgcgaccaaatttatcagcaacatcaccagcacctacgataaacaaaccagcaaataaggcagataagctaacagcgatatttatcgttccaacgtcactactatatgttgattgtaatgggacaacaagattaacaagtgactgcgcgaatagccagaaggtaataacccctaaaacgatacctaaaagcaatcggttgtcacctctaaattgttttgatgtgtccatgaattagataagcctcctatgtttaagaaaaacaaatttttaatatgatatattaagaaacaatatcataaatttgcagaaaattataaataaaacatctcattttttagtatttttacaataatcaacgctttttacccaaaaactttcatgataataatttctattttagtgtaaacgcatacaaacacaacctataaaaaggctactcaaagattatttgatctccttgagtagcctcattttttataaatcatgaaacggaatcgctaaattataaacatcttctactattacatattaatactttgcggccgatgattagattgatttttacgatgtcgtgtcgttgggtctaatcgtttttctaaaaatcttaatagtacatcaatgacgattgcaatgatagcaatcggaatcgcacctgctaaaataaacgttgtgccatccgtcgcatttgtaccacgaatcacaatgtcaccaagcgtaggtgctcctataaatgatccaacggcaacaacacctatcgcaacaaccaaggcaatacgaatgccaccgataataaccgaaacagataacggtaattcaatcattcgtagcacttgattgcgtgtcattcccatacctttgccagcatccttaatattcgcatcaacactagctataccagtataagtgttttttataattggaagtaacgcatataaaaacactgttaaaactactgtttctgagcctaagcccatgactaacattaaaatagctaacattgcaatgactggaactgtttgaattatatttgcaattgtaattacaaatccagaaagttttgtgtatcttgcaagcaagattcccaatggaataccaattaaagctgcaaacagcacaccatagacagacattaataagtgtttgaaaaataagtcccatagatagccaaagttcgtaacataataattgaataattgctgtaataaattaccttccattacttatgaccacctttctgtttatcaaaatagtggtgttttttcaaaaattcttctgcgacgacagcaggttctttacctttaccatccgcttcataattcaagcgctgcatctctgaagttgaaatctttcctgtcaacttattaatcgtcgttttaagttctgggtgttggcgtaataattcatttgttgcaacagcactcacagcataaggtgggaaaaattgtttatcatctttaagtactttcaaatcatacgcggcaattcgaccatctgtagaataacctaatgcaacgtctaacttctctgagtttaatgcgtcgtagactagacctatttgcattggtctcactgtaccaaagtcaaaaccatactcttttttaaatccttcatagccatcgcctttacgattcatccatgaactatccatacctaaacgtaaatctttactatgctttgctaaatctgaaactgtctctaaatgatattttttagcagtttccttcgttaccatgaatgcatacgtattcgcaaaaccatacgaattgaaaaatgtttgatcaaatttctttttaaatccttgttgtgtggctatcattgctttcttaggatctttaattggtgcttccttcaaaactcccgttaaatctgtgccattatatctaacacctgatatattagcatccccattaattaaggcattatgttgaatcgtacttgaccctaaattatttactaatgttggctttatcttgccatgtgtatcatgctctattaacaaccgtaacatatgtgaaataatttgcgattcgcttgttgataatgctgtaattttgacatcatttttcgtgctcttactacctagtccgggcaaactacatccagataatacggtaagcgataagacaagcacgacaagtatatatttaattttcttcattatcttagcctcctaattatccagatacttttaagcctttgggaactacccatttttcaactaaagctaataaggcatcaacacctaatgctagtgcagtaacgagtaccgttgcagttacaatcatcagtggatcatataaatttaaaccattgaaaatgaaatcacctaatccacccgcacctacataacttgcaagtgtagcccaactaattacatacacagacgacaagcgaataccgcctagtataagcggtaaggctaacggcaattcaacatccttcatcaattgaaattgtgtcattcccatactttttccagcttctttaatgttactatcaatattttgaacgccgagtaccgtgttatttaaaataggtaataatacataaataaatagcgctacaattgcaggcgttttaccaacaccaaaaatcggtatcataatagcaagtacagctagtgttggaatagtttgtaagacacctgccacagttaatataatattggcagttcgctttgtttttgataataaaatgcctataggtactgcaacaatgatggcaagtaataatgccactatagaaatatagaaatgttccagtgttttcgacatcaactgtccaccatgttcatgtaggaactcgatcatgatttatcatctcctatgtcacgtactttgacattagtagtgtgttgctcatgcacttttgaggacgcagtgtcttcccccacatattctgcttgcactgtatcctcactatcgccccaaatcgtgtcatatacaatatcaacaacattggcacgcgtaatcagtcctactaaacgctgttgatcatctacgacaggtacattcctaacgtttctttttaaaatcgtacgtacagaatcttgtaacttagaatcaatttgaacggtataaatatgttgttgcatggtttctcgtaaacttttgtgtccacgtataccctgatttatatcttcaatatctaagaatcctagtaaatggttatccctatctactacaaaaatagtatcaacacgtttttgtctcataatatgaacggcgtcattcagtgttgcttctgcttgtatcgtgattggtttaatcattacaccttctacagtcttgtcattgggacggtcttgaatcagtctattttgtcctataaaatcacgtacaaaatcatttgcgggatgtcttaaaatattgtccggtgtatcaaattgcaccaccttaccttctgacataatacaaattttgtctgctaatttaatcgcttcatccatatcatgtgttacaaagataaacgtcttgcctaattttcgttgtaacgttttaactaaatcttgtaacgtatctctcgtaataggatccaatgctccaaaaggttcatccattaaaataatatcttgttcggccgcaagtgctcttacgacaccgatacgttgttgttgcccacctgatagttctgctggataacgctctaaaaatgactccggtaaatccacaagtttaattaattcctttgcacgtttatccttttcttctttagtccatttcaacaatttgggtaccaacacaatattctctttaatcgtcatatgagtcattaagccaatttgttgaataacatagccaatatttctacgtaattcgacaggattcatactccgaacgtctttaccatcaatttcaatttgtccttctgtcgcttcaatcatacggtttatcattcttaaagcagtcgttttgccacttccactggttccaataaatgcgataaattccccagactgaatatctaaagagatgtcatctactgcctttttattaccagaatagattttcgttaaatgcttaatacttaacataatcatttctccttcctcataaaaaatatgacgaatgatacgcataaaataaaaagaccatcatcgcaattgttaaacaaatagagtcataagttaaacaagtacacatcatggtcttgattatgtagaattttatatttttcatctgtaatgtgaatacttaacagtaaacggcgctatgtatgttgaatttctaccgattactttgtttgcacattcgtatattcgacatttaaaactaacatactctatatgatgttattaaacattatcattttatcttttgcaactaaatagataactcatatttttcaaaagcgaatttattatcgctcaattggttgttttatagcaaaaaagtgtcaaaaatgtgaaatattattgcaaaagtcgaatttttgtaataatgcacacgcatccattgttacaggcggacaaacgcccacccgccactcacaaagtcctccttatatttcaatatcttcatcattcattgtagacacccttgccttatgctaacagttcctactcccaatcctgtaacggaattccaccgtcaaagtgttgcccatgataggcacacctaaaaaacaaccaacagcatgagccattggttgtttcgtgtcatcttgtatgttgttgtataaccggtatgcttttactcattaattacttatcatgcatccctttaccttctagtatttggttaatatacttttcaacacgcttttgtcttgtttcactgcgtttagcttgtccaatgtgataaatgtattgatgctgtctgcctggtgtcaatttataaaatgacgactctagctgtggcatttcttcgaacttagcttctaactctttaggaataacatattcctctgttttcttcatttcaacttttttaccagctttttcagctttaattgcttcagcaatatagtatttaatttcttctcgacgtgcttgaatctcttctagattttcaaatcgtaactgacgagctgcttgcaccttttcagtctgttgaatgagtgtatgatatttatcctccaaaatggcacctttatgaaataatagtgcaacataatttttgaagccatggataagtactacatttttattattcaacgtgtaacaaggatgcatccatttatacgcttcctctaattctgtttcattaaagattaacgctctcaaatatttatattcttcttgccattgactctctttatttaaaaatgcctcaacttgttcattcgattgtttctcactcatagtcatcacttccattttatttttcaatacacattgtattatatatcctaattttataaaaaactaattttacaaatgcttttgcattcttacaaaaaatgcatttgactattattataataagcgtataatttttcgcatactattttttgaattttcggcaataacgaaggagtatttatgattaaagacaagcaattgcacaacgaaaaaatcaatctatcccaattagtcttattagggttaggctctttaataggatctggttggctatttggtgcgtgggaagcatcatcaatagctggaccagcagcaatcatatcatgggttcttgggttcctagtcattggaaccattgcctataactacattgaaatcggcacaatgtttcctcaatcaggtggcatgagtaactatgcccagtatacacatggctcattattaggctttattgctgcttgggcgaattgggtgtctttggtgacaataatacctatcgaagctgtgtcagctgttcaatatatgagttcttggccgtggcattgggcgaaaccaatgaaacatttaatggaaaatggctctattagcacatacggattgctagctgtatatctcatcattgttattttttctttattaaactattggtccgtaaaacttttaacatcatttacgagtttaatttctgtatttaaattaggcgtacccatgttaaccatcatcatgttaatgttatcaggattcgacacttcaaattacggccattcagcaagcacatttatgccttacggaagtgcaccgatttttgctgcaacaacagcatcagggattattttttcattcaattcattccagacaattattaatatgggttcagaaattaaaaatcctgaaaaaaatatcgcaagaggcatcgctatttcactgtcaatcagtgcagtgttgtacatcattttacaaagtacgtttatcacttctatgcctcaatcaatgttacaacatagtggatggaatggcatcaacttcaattcaccatttgctgatttagctatcttattaggaattaattggctcgcaattttactatatattgaagcttttgtatcaccattcggtactggcgtctcatttgtcgccgttacaggtcgagttttacgagcaatggagaaaaatggacatatccctaaatttcttgggaagatgaacgaaaaatatcatattccacgtgtagcaatcatctttaatgccatcattagtatgattatggttacgttatttagagattggggtacgctagcagcagttatttctactgcaactttagtagcctatttaactggcccaacgacagtgattgcattaagaaaaatgggaccaacaatgactcgtccatttagagcaaaaattttaaaagtaatggcaccattatcatttgtattagcttcattagctatatattgggcaatgtggccaacaacggctgaagtaattttaatcattatacttggcttaccaatctacttcttctatgaatatcgtatgaattggcgtaatacaaagaaacaaattggtggtagcttatggattattgtatatttaatcgtgctatcaatactgtcatttataggaagcaaagaatttaaaggcttaaatatgattcactatccatttgactttatcgttattattattgtggcgcttatcttctattacatcggtacaacgagttcatttgaaagcgtctatttccgtcgcgcaacacgaatcaatacaaagatgcgcgagtcactaaataatgaatcaaagtcatcttattaaatattttaaaatgcagtgccatatatgatttcaacacacacattaaccaaccattgatttcaacatcttggttggttttttattttgaaaatgggttataaataactaacataacaagatagcgagagtgatattgtaatgaaatgtcactgtagaagaacatcatataatgctgaaaatggtttgagttaaaacagatatcaagctcgtctgattcagccacaaaattgtcttgttatacttgtcacctatcatccatagaccgtggtatgattaaattggggatgataaaggaggttaataaatatgaagattaatactacaggtggtcaaattcatggtattacacaagatggtttagatatcttcttaggcattccttatgcagaaccaccagttcatgacaatcgctttaaacattctacgttaaaaacacaatggtcagagccaattgatgcaactgaaatacaacccatcccaccgcaaccagacaacaaattagaagattttttctcctcacaatctgcaacttttactgaacatgaagactgtttatatttaaatatttggaaacaacataatgatcagtcgaagaaacctgtcatcatttatttttatggtggtagttttgaaaatggtcatggtacagccgaactctatcaaccggcacatttagtacaaaataacgacattatcgttattacatgcaattatcgtttaggcgcattaggatatttagactggtcatattttaataaaggttttcattccaataatggactttcagatcaaatcaatgtcataaaatgggtgcatcaatttattgaatccttcggtggcgacgctaataacattactttaatgggtcagtctgcaggcagtatgagcatttggactttacttaaaatacctgacattgagccatacttccataaagtcgttttgctaagtggcgcactacgattagacacccttgagagtgcacgcaataaagcacaacatttccaaaaattgatgctcgattatttagatacagatgatgttacgtcattatcgacagatgatattcttatgctgatggcgaagctaaaacaatctcgaggaccttctaaagggcttgatttaatatatgcgcctattaaaacagattatatacaaaataattatccaacaacgaaaccaatttttgcatgttatacaaaagatgaaggcgatatttatattactagtgaacaaaaaaaattatcgccgcaacgctttatcgacattatggaattaaatgatattcctttaaaatacgaagatgttcagacggcgaagcaacaatctttagcgattacacattgttatttcaaacagccgatgaagcaatttttacaacaactcaatatacaagattcaaacgcacaactatggcttgctgaatttgcatggcatgatacttctagtgcacactatcgcagtgcttaccatattctagatatggtattttggttcggaaacttacaaatattagcagcacatcaatatccaacaactgctcaccttaaatttttaagtcgacaaatgcaaaatgatttagctaattttgctaaaagcggtaaaatgccttggccgatgtatcataatgaacgtcgctattatcgcacatatcaataacgttatcgcatctaaaaaagcacacctgaatttgatagcaggcgtgcttttcatatgagaattatgatgatttaaatgttttagcataatgattatttttcaatgtgaaaacaacgattaatcctaatgagccaatgatggcactcgtatacgtgatagcttgaacagaaacatgtgtcatgaccaagcctccaataatgcctccaacaccaataccagcgtttaaactagacatgttccaactcattacttggcttgtgtcgccttcaacatgttgaatcacaccgctttgcactgctggattagtactccattgcatgatattccaaataaatagtcctgctaacaatagacctgaaccaggtaagatcaaattcataagtaacatcatcacgataaaaatagaaacagaaatcattaaccaacgcttacttgtaattttatcagagaatataccacctaatgatgttccaataacgccagcgattccatttactagaagtgctaatgaaacgaatgacatatcatgaccattagataaaataagtggatttataaagacgaatgtcactgagtttgcaatcaatactaaaaacgtaataattaaatattttgctacttcagcaggtcttaatattttcgaagtaacatgattttcatgagatggtgcctcatgattcacagggcctcgttgtatttcctgatccttcggtaaatagatcatcattaagaagccaacaataatactcacaataattaagaatagaaatgtatagcgccaacctactaaatcgccgataaccgttccaattggtacaccaaaaacattggcaccactaaaccctgtatagacaagtccaatcattttgccacgatttttaggtgctgataacatcgctgtaatagctaatacttttacgataattagtgctgctgctgcagatgagataattctaccaactactaatattgaaaaatttggcgctacagcaataatgccattaccaatgataaatataagtaatgtccataataatacaggccttgatgaaaaacggttcgttaatttaacaagaataggtccacatatcgcaaatgttaaagcgtacattgtcactaattgaccaacgacagcttctgatacatgtaagtcctgactcatcaagttcataattcctgcaaccatcatttcaaccattcctacgataaaaatacttaaaatgaatgtaaatagtcgcatgattgacattttaaaactcctttcaacaaaatttccgatattcatttcccttagaataacgatttattaaaaaatgtgtgcaacacaattttatatataaccgtcctattatataatattttgctttaattttctgtgcttaattggaaaattattgaaattgtttttcagtatttgaaaaattaacacaagtatgtcatttaataattatgtataattacttcagtttcaacaatgactccaaaaaagcacgcacgctttatatgtcagaacatataactgactacaaagtatgcgtgcctttatgaatattttcgctgcgctaaataataacattactatatgtgcgcgtcacttcattacaactatagcgaagctctaaatcacatccagcaattgctatcatgactcactcttaacatccgtatttcgtgctactaattgatgtcttgcattgaaaaattgaccatagcttaaatatgtcgcaatcaaagcagacataatggtcgcagttgtatgaataaacacgactaacaattgaaatttaatcgcttgtaaaggtggtacgccaccaataattaagcctgtcatcataccaggaatcgacacaagcccatatgttttaaccgaatcaattgttggcactatagctaaacgaatactttcacgtattgcacctttagaagccaatttagttgtagctgcaagtgataatttagattcaatattagtaccatcttgtacgaatgcacgatctaaattttggtaagctaaattaattgcaatcaagccattatttgcaagcatgccgccgataggtataacttcattggctgtaaattgaatggcccctgtcgcaatagtacctacaagcggtaatgccgttccaacaaagatagccacaaaggaaatcaaaaagacatggtgcatgacaggtgatgatcgactaatcgtattccatgatgcgttgacaataatgacaaatacacataatactaatagccatttgtcattaattttaaaaatatagtgcagtaagaatcctaaaatgattaattgtacgaccgcacgtagtgtcgccacaatcaaatctttaataatatgtagaccttctttataagaaataataattggaataactaatagcaatgccgtcagtcctaatgctgtattactcatgttggttcaactcctctgtattagaaatttgaccatcaacaatggttatacgcttttgaaagtgtcgcatactttggtcatcgctgtgggtaatccacataattgccacgccttgatctgctaatttaaaaatgatattttctattttttctttattattaatatctaacgcacttgttgattcatctaatagaaggatgtctggggtatacattaattggcgtgcaatcgcgatcctttgacgctcgccacctgacatatgttctattttagaacttaattgatagtgtcctaatcctacatctttaattaattgcttagcacgttttttatcaaatttatcattacgcgcaagagacggaaaaatcatattgtcttcaatcgtttcaccaaacaaatcgctttgttgcattaaatagctaatgtgtcggcgtaatatttctggttcgtaatcatcatatggtttacctttaaagtaaagcgttccactggttgggctaattaaattacatattaatttttgaaatgtacttttaccactacctgaaggaccaataattgcaatggtttcacctttatctacttttaaattaatatgatttagtatgactctatcacttgcctcatacactaaatcttttatctctaacaacatatttacccctcctcgtatcatgagttatttcgatataatagggtaatccttttcttgaatagcgtgcttacctataagtcggcctagtcaatgcttattacccattaaaatcgctctaataaaacatatcaaatatagtattcccatttttgaaaaatttagtgccatttcattctggaaaatttttttaatatttatgtgaaaattgaagtacactgcagtgacttagtctcatctttataaaaataaaaagcctttaacatgacatctcatgctaactaagcatctaacttagttcttgcatgacatcatattaaagactttctttattatttatggatttgactaccacatgatatttttataagtttcatcattcaatgaacggacaatttcagtaacaagacggacagaattttcataatcatctacattgagtaccgatacattagagtgcatgtatcgtaacgtgacacctattgtcatcgttggaataccttcatttgcgacatgaatacttcccgcatctgtacctccacctggtgtcgtatcccattgtacttcgatgttatgtttcttagctacatctttaatatgctttcgcaaaccttggtgcgcaatacttgtagcatccatcataataacaactggaccaccgcctagtttactatcactcgtttgacctgacatacctggtgtatcataagcaatacccacatcgacggctatcgccaaatctggtttaattgtattcgctgccactttcgcaccacgtaacccaacttcttcttgcactgtggcaccactgtataagttaatgccaatattttcatcttttaaacgttttaatacctcaacagctaatgcacagccatagcgattatcaaatgctttcgcagttaaatatttatcatttgtaagcacttcaaattcactatatggcgtaaccatattgcctacttcaacgccagcttcttcagcttcttccttgctactaacaccaatatctataaacatatttttgatttccattggctttttacgttcttcaggcgttaagacatgcggcggtttagaaccgatgatacctctaatttctttgcctgaatctgttgtaatcgttactttttgagataacatgacttgattccaccatccaccaactggcgtaaatgaaataaaaccatgtttatcaatctttgttaccataaaaccaacttcatccatatggccagaaatcataattgagtattgaccattctcagcatttttctttccaaaaatgccacccaaattatcttcaataatttgatcactgacaggctctatatagttacgcattgcttctttaacttgcatttcataaccagcaatgccgtttacatctgttaaatgtttaagtaatttgactgactgattcatgttattaatcctcctgtatttcaacttaaaactattgtatcactaactttcagaaaaacgttccctaccgctttatcgttttcaggcttaataattttaaaaactttgtgagaaatccgcttaaaaaaactcatatttacaaaatttaatattccgaaaaagtcacaatttaaaatttcttattataatacgttaatcttttattgtttttaatttcaatctgtttagtcttgcgctattaaaaaaataaaaagtgtagagataacaacgcattaacgccgcaatttctcctacacttaaatactagtttctttatttaacttatcattaaacttattcagatgttgaatatccattaatcataatgtgaccatgccgatagtattaatacttctttatttcgatcatctacggtatagacgatcctgtgctgatggttaattcttcttgaatatcgctctaaatatttaggttctaatttttcaaaggattgtgttattttatacggatcattttttaaagtctcaacaatttctaaaaatgacttctttaaataagaatgttttattttctttaaatctgatttcgctgaatttttaatcttaaccgtgtaattgctcattacagattatcccaatcaatatcatctatatttgttgtaccactactatctttttctctttctcttactttgtccattgtaccagtagattcaagatatattgtctcttgtatacttttccaatcttctaaacctataatcacagcattattttcggcattattgccactaatataaattggttcgtgattattattaacattttttagtaattgataaaaatcttttctcgcttctgtagggctagtgataatcatataaaccctcctttgtcttctgatacgctaattatagcgtacgtatttaagtacgtcaatatcaccgacacatccgtcgtaatcttagtccctatatactatcgtacacaagcttttgttcttttcttccaacataccgtctataatgctcaaaaagaaatcagcagtggaacacactacgttctctaccgttttatcgttttcaggcttaaatatttttaaaaactttgtgagaaatccgcttcaaaaacctcatatttacaaaaaaattatcaaaatttaaatttttgaataacatcattttttagtaaatgttataatttctttataatacaaatatcgaaagaaggcgactgactttgaaaaaattatgttcattaattgtagtagcattagtttgtgtcattgcattatcagcttgtggtaaagaacaaaccaaaacatatgaaggtgatgttagtggtaaacatgtactaacttctatcacatataaagatgataaagttttaaaacagtctacaatcaacacaattaaatatgacgatctaggtatggataaagacgaagccaaaaagttattcgccaaatctgaaagtattttcaaagaccttaaaggcgtaaaatacaaagtagactataaagataaaaaagcaattgaacacttagacatagattacacagaagttgacatgaaaaaattaaataaacgtcttggtgtttcaactaaagaaaataaagatattagttttgaaaaacttgaaaagcaattaaagcacagaggcttaaaagaaaaagataaaatggacgacaaatagtttataacataaaaatgccctcagataagactaaggttacaaaccttaattcatattctgagggctttaatatttgaaattcttgtgtgaccaacatccactactaatataaaattatttgcagtaacgctaaaatccgctgctttcattttcccgaaataaataagttaactaatgagttttaatttataatcatgtatcgtttgcaattcaccatcgacttttcgatatacaatatgatcagcagtaatttctgtagggcttgatacgccaacagctgctgcaatattgaataagccttcatgcaaacttgttacatagtttgtgacacgatattgcttttctccaacaatcaatgctttttcttttttcgcatctgtcgttgcaacacctacaggacatgtattcatatgacattgttgactcataatacaaccgacactaatcatcatgccacgtgcaatattaacaaaatctgcacctaaacctagtgcaatcgcaattttatctggtgtcactaacttaccagatgccgctaatttcactttatctcgaataccatatttttctaacatgccagacacaataggtagagctgtaaatagcggtaagccaacaccatcttgtaattcttggaatgttgcaccagtaccaccttcaccaccgtcaatcgtaataaagcttggatacttatctaattccaccatcgtacgtacaagtgtttcaatttctgaaactttgcttactacaattttgaatcctactggtttttgacctaattgctgcaactgatcgacgaaacgaatcaaatcttcagcattatgaataaattcgtaacggttaggtgaattgattgttttataaggttcaacatttcggattttagcaatttcttcgtttaccttttcagcttccatatgaccaccacgagtcttagcaccttgtgccaacttcagctcaaatgcgcgaacgttagttaactgtgcgacctctttaaataaaccttcactaaaattaccttccttatcacgaacaccaaataaaccgggaccaatttggaaaattatatccccattaccttttaaatgatattctgataagccaccttcacctgtattcatccaagtgcccgctttagctagacctttagataaagctgtaatggcattttttcctaaggctccataactcatacccgattgtcctacgatacgttttaaaataaacggatgttttaaatgttcacctaattttattgcatgatcatcacttaagtaatacggatcaatctttgtcggtacacgatattcttcacgactaaataaacgctcattcgcgattttataaatgaatgttgataacaatgttgtattatctactgaaatctcattacgttgcatcggaaacattgtgttctgtatgtaaaagccgtcttgataatctttagtagtaccgaagctggtcatacgagagttatattttccagccaaaacgatatttttataatcattacgtgaaaaaggtttcccttcattatccccagaaaataaatactgacgtaattccggtcccattttttctgaaatatatctaatacgtgctagtaaaggataattccttaatacactatgttgtgattgtcttttatctttaattaaccaaataagcccgataaccatgaccgtaagcaggaagcctataatgataatattaactataaattgcatgactgtaagaaacgtcattacaatccctcccccaaaaaatttcaattcaatatttatgatacaccttacaaaataaaacacaatggaagcgcttcattttataaaacaattttatgatatgtttttcattttaaattttaatgtataaaacatacaatacaaagtaatatgtgctaaagtatctatataatacaactatttaagaggtatactatgtcaaatacaaataaacattacatagaagaagaatacgctaccgaacaatcgcgttttttcaaacgtgatattggatttattttcctttatatatttttggttaacatcttgccaatcattatcgtttttttaacttttgggttagtagctgtattcactcaacaagccccatggggtttctcttttcctatttcaatgaacattagctatttactcgcagttattatttcactagctatttttcgtcggatgcatgaagatgcatttgttccaatgatacgtatgcaaatcgttgccagtgctaaatataaatggcatattcttatatcatttacattaagtatcgtactctttttacttttaaatcatttcgctattttcgcactaaatgtagattcctttactgtctttgacatttacccgctcattagagaatatggttccatcagtttaatagctatattttcgttaaccattatattaaatactttgatttgtcaacttattttccgtcatattttaattcaagaattaagcagattaatacctttaaagattacaatagtattatccgttatccttgaaacactgtactattatccatacattaatacatggtgggaattcattccagcattgatactagctagtagtgcgacttacttatatttaaaatcaaaccgtaattttatggtgagctatttctatcaattagcagttatactcgttttgcatattttcatgtaaattttttcagagtattatccattatccatacacatcaaaaagcacacttaaaagtcagtatcacaactcacttttaagcgtgctttatttagatatactgtcgttctaaaaacgagccatatagaatgtttcatgtcctagcatgaagcacatgaatcgccatgctcaatataccttttaaaatttaaatattcattaacttaatatgctttaattcacttcattaaagactatttgctgggcgtggtgttggttttttcaataaactcataatcattattacaatgactaacataccacaaattagatacatccatttaaatcctactaaatcggaaataggtcccatcaatgcgccacctaacgatatacctaagtctgcacaggcaataaataaacctaacaacatattacgacctacttttggtaagacgaaacttaagtatgatgttaatgttgggtacaccattgcttgtgtcattcctattaatattgcactgccatagaaaataattgcacctacttgcggaccaaatgctactacaaatgacgcgattactaataatgatagtacagataccatatatttaggatgccacataccatctgacggaatgtatttccttaagtaaaatcttgccacaacaactgcaatggcctgtattgtcaaaaagattcccgcattcgcgaatcctaaactcactgtgtataacggtacaaatgtactaactgcaccaaatacaatcgatgcaacaatcatgataataccactgttcaacaactctttatttttgaaaaattgcgcaaaaacagttacagcgttaaacggcattttttcaatcttatctgacgtatcgggttcctgttcagcaaaggtcacgcgatagccaaagaatgttgttgttaatgcgataaagataatgacaattgcaaatagtgaaatattatttgcattccaaatacctacggcaactaatggtccgattaagtttggaatcgttgaaaatagcgagtacaatgatacaccttcagaacgatgttcctccggtaatgcatcaataatacctagctgtaaagacatagaaaagaatgccgtacacacaccttgcataacacgtgctacgaaataaccttctaagccagtaaaaccataaataattaaagctatggcattgataatcaaaataattcttaatactttaatgggaccgacacgagcaataatttgtcctgcccatggtcgaaataccattgctgttaacatgtatgcccccataacgataccgataaccgtattcgttgcgcctaaatcatgccctcgtaaaggtataaacacgtttaagattgcattggcactaaagaacatcaatgttaatatatataatctcaaaaagggccaagccattgcacctttcattatctcactccttagaatgatagttgtttttctattaattctcttgtataagcattgtcacttttatgcaatgcgcttgtcggaatttgttcttctatttttccgtttttaaaaataattaattgatcacataaatacgtggcagcttgaatatcatgtgtgataaaaatataactcaactgacgcgtttcacgtaaatgaatcaataaatctaatatttgtgtttgaattgacatgtcgagtgaactaatggcttcatcaaacaaaatatatttagggttaatacatattgcgcgcgcaatcgcaacacgctgtgcctctccacctgataacatattaggatatttatccatgtatgccttagatagaccaacttcttccaacaatgtaattgcttggacttccataacatctttaggttgtccatcacattgacacatcacttcaaataagatttctctaacagtctgaaatgggtgtaatgatgacgtataatcttgaaatacagcaccaatttgatgacgtctcactttcttcttatgcatcggttgatcatttaaggttacacaacctttatctggtttctcaatacctaatatcatacgactcaacgtcgatttaccgctaccactttctccgataatcgcaatcgtcgcaccgattggacactcaaatgacacacctttcacgataggtgttcgacgacgcttaaaaacatgtgcgctttgatatgacttttcaacatctttaattttaatcatgtacatcacccctcatcacatgtttaaaatgatcattaatctttttcttagtggataataaatacttcgtataaacatgttctggatgatgcaagactgattcacgcgtaccatgctcaatcagttgaccatttttcatcacaacaacacggtctgcaatcttgttaataaccgttaaatcatgtgaaatgaaaatcatcgcacagtcaaagtgtttttttatatctataaatgcttccagtacatcatattgtgtaattgtatctaaagccgttgtcggctcatcagcaatgattaactttggtttcaaagctaacgctaaagcaatcatcaatcgctgtaacattcctcctgataacatgtaagggtatgattttaatatacgtttaggatctttcaaacttaaataatccatatattcaatcaatgtcttttcaatttcttgtgtagacattgacgtatgtactttcatagtctcaaacatttgtttaccgacagtagttgatggatcaaaggcacgactaccttgttgcatgaccatcgcaatatctttaccacggtattttttcaattgtgtttccgataacgacaacattgacttaccatcaaaggttatatcacctgttacgcgtaatcgttctggatttaaacctacaatcgatttgcatgtaattgatttaccgctaccactttctccaataacgcctaaagtttcacccttagttaatgtaaaattcacatcactcacgagtggttgatctgtccaggtatctgtaatcgtcaaatgcttaactgttaacaatgtcatgattgcaccactccttttttcacagaacgaagtttatctttagaagagatgcggggatcaatggcaatttgtaaagcatcggataagaagttaaatgccatgactataatcactatggcaatacctggcgcaaacatcatttcaggatgtgtaaacatcacttttctagcttcgttaagcatcatgccccactctgcagtaggcgctttgacacctaatcctaaaaatgaaaagccagatatttgcaagatcattgaacacatcgaactactagagatgatagcaatatctgctaatgttaacggcataatatgtttgtgaataattttcatatcattcataccgattgttttagcaaatcttacatggtcagaagcagtgtactgcataacacttgtacgtataacgcgacagaaccatgcccaacgcgtcaaaataaatgccatgataatattttcggcacccataccaaacaatgcaattaatgctaacgttacaacataacttgggaatgccaacataacatcacacgcacgcatgattaaggcgtcaacaaacccttggaaatatcctgataagaatcctaaaatagatccaataagtacagaaacaaatagtgcaacaaagacatataacaaacttggtctaatcgcataaattaacctagttaaaatatctctacctaaatggtcagtacctagtagatgttgaaaactcatgccagcaaatttgtttgctgtatcgatatggttaggatcataaaatgtcacaagtggtgctgctaatcctaaaaagacatataatacaataatgcctaaagcaatcactgcacctttatcttgtaataatcgttttaaaattatcatcgtgcgccctcccttaatcttggatttaatagcgcattaatgatatctgctaatgtattaaatacaataaataataccgctacaattaatacatatgcttgaatgactggaaaatcatgttcaagtattgcttttaaacttaattgacctaatccaggccatgcaaagatatactcgataacaactagtccacccattatcattggtatagacatacaaaagattgataccgcaacttgtaaagcattacgcaacacatgcaacattaatgtgatagatttcacaccgcttgctcttaaataaagtacataatcttcatttaattgttccaccatcgagcgtctaacatttctaaagtaaataccagcataggcaatcgtaataacgatcactggcaatatgtaactttctggacctgttaatccagaagtcggcaatatgtttaacttcactgaaacgtaaataataagtattgaagctatccaatatgatggtaatgcagttagaaagaaagccactgaacgtatcgcacgatcagtgaactttcctctttttaatgcactaactacacctaaaataattgatgtaatcatcaccataacacttgaaatcattgttaatttcaatgtattcataaatgctggaccaatgcgttcagcaacaggatcacctgtaatgtagcttgtaccaaaattaaattgcatcgcttcaagtaaccaatttttatattgaattaataatggatcattgaaaccgtacttctcattcgtttctgcaatcaactctggtgttacatttggcgttccttgtgcatgtaaaattgtcacagctggattttcatttgtaatatacgtcaatagaaatgtcataaaacttactacaatcatcaatggaaacatgagcgcaatacgttttaagataaatttgaacatctaaacgctcctttatttatactgcatttcattgaatggtaattcatactgtgattgtgtgaatgatactttttctaaatctttcggcgcaacaactgtcatactaccgtgtgaaatagggataaaaataccttcatcatcaatttgtttcaaagtgtttttataagcgtctgaacgctctttaccgttttggattttaaatgcgtcatcaatgctgttgtatattttatctttgttctcaatgcctgatgttgcactttcataaccatttttcgctttaaatgctgcaatagtactttgtggatcgtacaataatccccaagtttggttgaacattaagtcataatcaccagaagtacgacgttcagcaattttatctgatgtttcgccattgatgtttaacttaatacccattttcttaaattctgcttgtaagtattctgcttgttctttttgacttgaagaacctttgtcatagtacattgccatttcaaggtttttaccatctttttgacgaacatcgctgtctttacctttcttccaaccagcttcatctaataatgattctgcttttttaaggtcatacttacgtgttggcatatcgaaattaatgtctgttacatttttcgcaaataattgagttgctggtttttcttgaccatctaaaatttctttggcaattttatctctgtttaccatatgaccaatcgcttgtctgactgttttgtcactgacagcgttatctttttcaccagaattgaccactaacattttcgtattcataggttgactacgcttaacttgatagtcacctgtatctttcaattgttttaaagagtctttgtctaagctatctgtacctctatcgtctgtgaaggcaaagtttgtttcaccttttttcattgataggaatgctgtttcaccagcaggcattacttttgcttgtactttgttaagtttagacttttcgccccagtattgatcatttttattaaagtctgcagactcatcttttttgtgttcacctaatttaaatggaccagtaccatcgaactttttaacgccatcttttgttgtgccgtttttaaagtcttttggagatacaaatacatatggacgaggcatcgctaattcagccaatgcaggttgatatgcttctttcaaatttaattcaaccgtgtacttatctttaactttaacattgtcaattaatgttgaaatctttaaccaagaatgcaattttttgttttcttgaactgcgtcaatatttttcttaactgcgtcagcatcaaatggcgtaccatcatggaatttaacgtcatctctcaaatggaacgtgtatgtcttcccatcttctgacacatcccattttttagctagtaaaggcttaatcccatctttcgtgttacgtacaagcggctcgtatatcatactttcagcagacatcgatccaccgtaaacatgcggattcatatccccgatatctttaaccgtcgtatacgttaattgcttgttttcttttttctcctctaaacctttattaccgccacaaccagttaaaattagccctgatgcaagtaacattgcactcattttagttagttttctcatttgcttttcctctttctaaattgataagttgcattacttaatcaaatcgtaatgattatttttctcaattatttgcttatttttatgtaaatgtcaaacataattcaataatttttttctattataaaacttcaaacccttattatgaaagcgttctattgatttccaaaaattttgtgacgagtgccttatctccttcaaatagatttgtattaaattgagaagatagttgttgatcttgatgcatatccttgtacgtcttacaacttgcttcatagcgagttaggaactgattaatcattggcgttttgatacctagcatttccccaatatgctgaatcatcgctgttctgtaataatcctcacttggcattcttggaatttgaacaacatcctgttcatttttatagacttgcttaaatggtacagctgaaaaatcaaagtaatgtccgttttcgtctggctgtgaaaatggatcaataaggattgcggtatatcttacataaagcagatattcttgtaagatatctggcaagatttcgaaatgctcaatatcaccttcatccaaagtttcaggacgtactggataattttccttcaccataaattgaagcaggttgactgacggtactctaaatgcttgtaaaatagccatcatttccttccacattaaacgcatttcacggattagtgtcatcgttatcggtccttcaggaaataacttatacacataaaccggtacatccgttccttcgaaaatggctttcaatgaaaagtcattcataaatagtggtgggtgcacataaagcgagctgtttcgcgtttcagcatgcagtggcgattcaacgacttctaattgaatcttcaactgctcagctaaagcagagattcgttgacacattgttgagtttgaatgtgtcgatcccatgtacaatttcttttttacacctgttgtcaacacatgattaggtgcttctttatcaacaatacgtgtatcgccaagataagttgaaaatgaaatcacttcgatatcctgactgaacttagacataaattgttccacaatcatttgcgatccaaatgtcggtgaaattaaaatgacatgtttgacactttgcaaagtttctaacgacaattgctgtagtgtgtcataataagcatctgctgtgcatgccatgacaaccgtttcgtattcacccttaacgtttttaacatctttatacaaacgattaatttcaaacttaccttccagatgttgatgcgcctcgttttgtattttgacttcaaattgtttctcttttttatacgcttgatataagcgttttgatttttctgatgttgaggcacgtccaaccatatcaatctcataatctgattttaaatagcaaatattcgctaattggattgcgaccggaccagtgcctatcattaataatttagacatccgtaatacctacctttatagctgcttttttataaagtgctatatcaaaaatttgctgtggtctcatatgtttattcacacattgccacttatcttccgctgtttcttgtgacggataattaaatattgctttgatgccatcaccaaagcgcattgcaactacgacattttcatttgttaaatcatataattcttctaaaatgctgtactttaaaggaattgtcgagctgaatatgatatgcgtcacatctttgatatctttaagttcagataccttttgatccgtaattgttatatcttcatttggtgctaagacgttaacgattctgcgtcctaggtcaacggcttgtggatcaatatcaataccgataactgaagcacctgtttcttttgctacttgaattaacgtcattggatatgcacctgaaccaactaacaataatttgtcattgctagctatactacattgtccaaactcttcatcaatacaatgttctatattgtcaaagtaacctgtggtagacgcctgtccgtctaatagacgtctagctctaatgacttccacttgtttaacacactgcgctgtaatatattgcagtgattttattaattgtgctttttcttcaacgtcacgccaagcattaaattgttgttcataaataggatttaaaataaattcactatagtcatccatcaatgtttctaatacttcgatatattgatcgtcttgtaatacacgctcgtaatgcgcttcaaacttttctaaatattgttgtaatatcaatttgatttcattattaaagttattcattgtaggctccttattctatatatgcttttcctgtagctacagttgtaacctgtcctttaattgaagtttgatatcccaattgatgacatcgctttgatgtcactaaaatactgccccctggctgatgtactgtaaaatctttgcatgcgtcattacgttgataattattaaaaaccccaattgatgctgtaccagaaccacagctattttcccaaattaaactttggatttctggtatatagattaatggctgtaaaaattgacgttgttcatcaaaaagcatcatacctactgttttatatttgtgattccattgttgctcacgcacatatgtttcaaccaaatgttgaatttctgttgttacttgactaactggaatcacataatgtacatatgtttcataaataatttctattgctttccatgaatgattacccatattaattgttgttggcacaacacgatgggcttgtggcatttgaacttcatagtattggcagtcatgaattgcgcattgcactaaatccgaacagccagataccttcaccttaaactgttggtctttaagcaaatgactttcctgcaaatgatgtatatatgacatcgtcgcattaccgcaaaattcattaccgctcataactaagtgaaaatcattgccatcatcattttgtgttgattctataaagcctacctgttcacaacatacatgtgttgcggccatcaactgattggcgatagatgcatattcactagcatcatgttttgaatgaacaagtatcgtcatattccccgaaggattatacttagaaaattctataacctgccgattcatacgacactcctttagatgtatttttagagcctctgtaattttaattactagaggctcttatgcagttgttgcgaagcaagcaactgtattcctctagctcttttaccttaagtgatttttcagaagatgaacctaatagtttcccatctattaggtaagtcatgctaatccgcaaaagcgaaaagcatggctttatatgcagttgttgcgaagcaaacaactgtattcctctatacctgtaattttttagaagatgaacctaatagtttcccatctattaggtaagtcatgctaatccgcaaagtggaaagcatgacttagtaatcggttgttgcatcaacatgcaaccgtaaaccttatttaaagttgcttcttgtggctctacaagcgaatgcagttgtccgttaactacattcacttagatgcttttactgttttcacctcaactaaaacttcaaaaaagttgcagaaaacaaatcgtaactattacgatttgattatatactatattagttgagaatcattgtcaataaaggttgtaaatgaaagcacatttatattttatgaatccctccataaacatcgcattctcagcacattcaagtctttttgaaaatttttatcaaacaaaaaagccagcttcaacgtaaaatacgttaaaactagctttaagcaatacatttcatcaaataaacaaatatttatttttcaaaggttaataattccccgtcatttggtacaacaactctattacctaagtcgttagaatttataaattcattcagctcttcacgagataaatgccaatgattgaccgcttccatattcacaacaactatttgagcaagcgacaatgtatgagcgactttcaatacatcatgttcatccatcactaacggcccgccttcaaagaattgatttgcaccaccattaagtactatgatatctggatgatgcgcttttaaagtcttctcaacaccgtcgaaccaaaccgtatcagcagctaaatataacgttggcttttcagaatgtttcagcactaaaccgtgaacatgtcctgtcattttcaagatttcaccatgcccatgttgagcatctgttttaatcaactcaatttctccaatgtgtgtcacatcattaaataccgaaacgtttgtaaagtcataaccctccacttcactagcgtctgcttcgttttgtgtataaattttaatatcttttggcaatacttcaatcgctttcggatcaaaatgatcaatatgcaaatgtgttaaaattactaaatcgatgttgttaatgatatcttcaattgctaatggtagttctacaagtggattgttttcatcttgtctcggtgaatttggaaatggttcaaatgcgcctttgtcacttagcattggatcaatcaaaacgcgtttacctccatactcaatcacggccgtggcatttcttatatgtctaatattcatgttaaatccccctatttcatatgtctgtcattgcgacaatatgcatacattgcctacttcatgccaaattattttccactggatatcgattttaaaacaattattccaatgtccgcttccacgaatcatcactcaacatctcaccaggccatgtgtaagccataacaccaccgtcaatgcgaattgtttcaccagtaataaatgaactctcatcagatgctaaaaagacaacgagcttgcctacttcttctggtttgcctaaacgtcccagcggtgtcatccatttctgattttctctaaacgctttgccttccttatcttcgctagtacctgtcagtttatctactaacggggtttcaattgtacctggtgcaattgcattagctcgaatgccatctctaccatattcgattgcaatggatttagtaaaattaatcactgcccctttcgcagcattatatcctgagcgatacaaatctgctgcctgtcctgaaaatgaagatgtgttaacaatagagccacctttagtcatcattaaaggtaacatcattttcgtcatcaaaaatgttccacgcatatctacattcataatcttgtcatatacatctgttggatactcatgaattctaccagccgcattatccacaccggcattattaaataacacatcaacatgcccaatctgttctctaatttctgatgcaaaattgtcaatttgttgttcgcttgcaatatccacaatataagcctttgctttgtcaccattacttttaattttatcgacagtctccgataccgcttcagctatgtctaccgccaatacatacgcaccttcttgagctaaagcgattgcagaagcttgtccgatacctgtacttgctcctgttacgactgcaactttattttccaaacgtttcattcagtcactcctatacaacatatcttaaacttacagtccttattttccactgttcaatgcttcataaacctaatagctaagtctccaggcagtcttagctactctctgctatacaatttctattgaataactcaaaatatttaacaatattagatttttcattttctgaaaattgttacttttgagagtattttttgttacactttaaatatttaacaaaggggggaatcattgatgacatcaaaacatcaacaaaaggggtctatcgtcaatcgtttcttgaatagtgttgaaaaaattggaaataaattgccagatcctagcgttttattctttttaatgtgtgtgggcttagccattatgacgtgggttatctcattatttaatgtatctgttaagcatccaggtacgcatcaaaccatttatattaaaaatataattagccatgatggatttacaatgataatgaatgatacgattaaaaatttctcagagttcccagcattaggcttagtactagcaatgatgattggtataggtgttgcagagaaaacaggatacttcgacaagttaatgatttctgttgtgaatcgcgcaccacgtttcttaattttaccgactattatattaattgggattttaggtagtacagccggcgatgctgctacaattatcttgccgccgctcgcagcgatgctttttattaaaattggctatcaccctatcgctggactaacgatggcatatgcttccgctgtaggtggctttgccgcaaatatagttgttggtatgcaagatgctttagtctattcatttacagaaccagcaacacgtatcgtttcagattctattaaaacaaatgttgctatgaactggtactttatcgcagtgagtgtcgttgtattacttcctacgatattgctagttacaactaaactgattattcctaggttaggtcaatatgatgatcgtttaatgcatgatgatcatgaagaaacgtcttcacatattactgacaaagaagcacatgctttaaaatgggcaaatatcagtttcatagtcacaattattttattaattattacagccattcctgaacatagctttttaagaaatgctaaaacaggcagcttactagacgatgcgccattaattaacggtgtcggattaattattcttgttgtatttttagtacctggattagtttatgggattttaagcaaagaaattaaaaatacaaaagacttaggtaaaatgtttggcgatgctgtaggatcaatgggaacatttatcgttattgtgttttttgcagcacagctacttgcgtatttaaagtggagtaatttaggaattatcgctgctgttaaaggtgccaaattattagaacatcaaaacggtattgtattgatactaggtattattgtactgagtgcaatggtcaacatgttaatcggaagcgcatcggctaaatggggtattttaggaccgatattcgtaccaatgttaatccttatcggctttcaccccgcatttacacaagtcatttaccgtgtaggagattcaattaccaatccaattacaccgatgatgccgtacttacctttactattaacttatgcacaaaaatacgataaacgcatgaaactcggagccttactttctagtttaatgccgtattcaatcgcgctaagtattgcgtggacagtatttgtcattatttggttcttattaggtatccctgttggaccaggtggaccgatattcgttaaataacagcactcaaggggataatttaaaatgccactatacaagatttgacctgtatagtggcatgatttgttatgatatagcgttcgagatgaaactctgtatttatatgaacaattatagtttatcactaataatatttagtctgttccaaccgttaatttggtttacaacaaagacaagatcaataatttgttcttcatcataaaatgattttagccggtcaataatttcaaacttcttaaagtctttgattgaatttaacatttctgcaaattcaagcgtcactttttcttgatcagtaaataaatctaaatgtctaaaactcaagacttcatcaattttcatttgtgttacacccaattcctttaattcttttttatggatatcaacacaataatgacaaccgttaatttttgaaattaataacttaatcaatgcactaagttcatcattaacgggtgattgatgaataaacttttcaccttggctcattacagacattaactctccattttgtttcttgtaattatacggcatttgcaatctctcctttacattgtttaataccaatccagtgatactacacttcgaacaatattggatagaatttgaaattctgtataacatcttgtcaatctgtgctttagttaaaacatttagcgcttatatttaaaaaatatataaaatatgaaaacagattgaaaggatattataccttgctctacccttttttataaaaaatcacacacatttgagaaaatttgataatgtcaataaatcacgtcatcgccattgttattcggtatataatgtttttataatggccaaactattatttcatttatattaatagggttcacttgtgttaatgtactgtaaaaaaactggcgaagtattggtgatgatgaagtgatttatattaattgcgaaacaccttcgatagcaatgaaatagattattggaagattaaatcaaaaataaagaagaccctagcggccttcttttttgtctaattcttctttgatttcgtcaggtgattttgtttttattttaattatttccgataaatttttgcttagtattatatcacctacaaattgaaagttattttcaggcgatgcataagcaacaaaatcatcttttttgttttcgtttatgtatccttcaatcactgcacttcccataggacttgtttccaactttgtgaagtgtacagatttgatcgtattcggttctttagtgttatgcttgagataaagtgtaatacgcgcttgttgttctttataataaattgctttttgcttttctttttcatcatatttcattttaaaatgtatgaccgtagcgactatacatatacataaaataacaccaataattataaaaacatgttttttggacatttaaccacctccaacttttagtgacccttctttttgtttagctctttttttatatcatcaggcgattttaatttctgtgctggttttagtaattcacttaatctttcactttctatcatagcgccaccaaattgataattatgttctggtgtagcataagcagtaaaattatcttttttgttttcatttatgtaaccttcaatcatagcacttcccataggacttgtttccaagttagtgaaatgtacagatttgatcgtgttcggttctatagtattatgcttgagataaagtgtaatgcgctcttgttgttctttataataaattgatttttgtttttctttttcgtcatatttcattttaaaatagatacctgcaacactgattaatatgattaacataatattagttaatattaaaattttctttttcgacatgtatcaccagctcctaatgtaaggtggaaaatgaaaaatttttatagttctgtaataattaatgttatagtttataaatcatagtaccactatcgtcgtatccaacaacgtgaatattagaattaactattactgagaattgaacgatatgatattccgcttctataaaattcgacaccctactaacataaatatcttcgatagcaatcgatattaaacatgtacaaatcaagctaaatattacgtgaaaatcactgtttagtgtttttctttttgtttatttcttctttaattttttcaggagattttaaattttcagcgttcttcaattttcctaagacttcattacttcctgtcaatcctccagtgaattgatagttttcttcaggtgacccatatgcaacaaaatcagcttttttgtgttcattgatgtatccttcaattactgcatcgcccataggtcctgtctttaaacttgtgaaatgcacagatttgatggtattgggttctttggtattatgcttgagataaagtgtaatgcgctcttgttgtcctttgtagtaaagtgctttttgtttttctttttcgtcataatttcatttttaaataaatgactgatgcaactatacatatacataaaatgacaccaataattataaaaacatgttttttgttcattaaagtaactcctaactttagtgactctactttttatttagttctttttttatatcatctggtgattttaattgatgcgctggttttagtaactcacttaatctttcacttttaattaaatcacctacaaattgaaagttattttcaggtgatgcataggcaacaaaatcatcttctttattttcatttatgtaaccttcaatcacagcacttcccataggacttgtttccaagtttgtgaaatgtacagatttgattgtgttcggttctatagtattatgcttaagataaagtgtaatgcgcgcttgttgttctttataataaattgatttttgtttttctttttcatcatatttcattttaaaatagatacttgcaacactaattaatatgattaatataatactagttaacattaaaattttctttttcaacatatatcaccagctcctaaaatgtggtgggattttatacagtttacatgtttatgatactacataacacgctcttacaaagaaaaactataattttaatctaggtcaaggaaaagcaattaaaagtgttgatataaagttcatctaagatcatcggaatattgcggttatgaagtggttaacagataaattcagtggaaattgtactaaaaattcaacttttcatttttatgtgtaagtatgattaacttgaaagcaaaattaaaacgaccgcatagttttagcggtcgttctttttagactctaattccttttttatctcatcaggtgatttggtttgatgtgctggttttaataacgtgcttaaatttttacttttgatcaaacttccaccaaattgataatgatgttctggagacccatatgcaacaaaatcagcttttttgttttcattgatgtaaccttcaattacggcatcgcccataggtcctgtctttaaacttgtgaaatgtacagatttgatcgtgttcggttctttagtgttatgcttgagatagagtgtaatacgctcttgttgttctttataataaattgatttttgcttttctttttcgtcatatttcacttttaaataaatgactgtagcaactatacatatacataaaataacaccaataattataaaaacatgttttttggtcattaaagcaactcctaaaatgtggtggaaaatgaaaaagtttttatagttctgtaattatgaacattatagattataaatcatagcactaatatcgtcgccttcactcactcgattgttaaaatcaccagttactgagaattgtgcaaggaataatttcctatcatgcttttatatcattattgccttactaatattaacaaaaccgatagctattacattaaatgcctacctcccacacctcaaacacctttttatacaggacgcactgtaatttcattcacgttaacgtgctttggttgtgttaatgcatataatactgcttctgcaatatcttgtggctcaagttttttacgatctgttggattgtatgtggcagttattgctgtatcaaccattcctggagaaatgcttgttactttaacacctgtctttgccaactctttttctaatccttgagtaatagtgtgaactgccgctttcgtcgcactataaatcgtactgcttttcgttacttcaaagccagaaatagatgcaatgttaataagatggccacttgattgttctaacatagttggtaatgcagcctttgccgtgtataaagtgcctttgatattaacatcaatcatactatcccattcatctacttgataatcagtaatcttagacgacaacatttgccccgcactattgatgacaatatccaaaccaccgaatgtttgttgtgccatttttatcaattcatcgacttcttcttttttcgttacatcagttggcactaccttcacactatcttgagctaattgattcgccacattttgtagtttatctttatttctaccggctaagacaactttcgccccttcttcatgtagtaatgttgcaattgcttctccaataccactacctgcacctgtaactactgctattttatctgttaatactgtcataatgatcgactcctttgattctttttatttttttagggtacatcataagtacatattactatttatacttttaaaaagcgtatcacaattcatattctggttatactaactcgatttatttacactgataaagtacatttttaagttattcaaaatatacaaataatcgttgttcatattttttatttttaaaaatgttgaaaaattgtcaattctttattgtaaaagtcgaaagttagtactaaagttataagtattagtaaacaatggcaaggctgttagaaatgggggagttattgtgacatatcatgagcgtgtgttagcactgagagcagaaagtaaaagaactgcatttgattttagattcgaggatttatttagcaaagaagaatggctaagtatgtcgcttgcagaaagacaaaaagccgagaaagcatttcgacacgaaatcaaaaaattagatgatgtaagaatgcccttctcaagtgcacatgatgcccaagtgaaactgtataatgttgtgtattcatacaatggcattaaacgtaatttcaaacaagttgaaaatgaaggattctaatatcatttcgtttatatatcgtggacatgatacagttatatataatcttgtaggtaatcatactaaaattcaatatagacatgactaaagccacatccaatataggacgtggcttttagtatcgttccagatttgtggggagttagggtttacttaattaaaggggtctgccctcaattgctcaccaacgagggcaagttacatcaatcacacttcaattgccgccgactaggggtagtaatcattggcaataagaactagttagtgactaacgatttacgttccatagcaaagtgatacaaacgctcagcatcaatgtaaggcatagaatcaatagttaggtaaccatctttgatgtcaccaattaatccttgatttacaccagtgttcacgtaaatatcatagctacttacgtctgagaaaataagcgcttcaatctcttttctcataatcatcactccaatgtttatatattatttatataaactctctcgtctctctctatttattaacttcttacaagtctaatattacatgaatttctaaataaataaaggggtttgtgatgcatttcacaaatttatcactattttggaaaattaagaaatagttaattatataaaagtttaataagtcagaaaatatgataaaatgtagatgttctttagacattaaaagcttctaacatgatacggaatatgaggttcctgtatcacattagaagcttttttgttgtggtgcttatattgataatggcatgaatgaacacacgctgtcttagtttcaggaatcggctagaatattaaacttccgttctttgaatattttttaatttcttactaatatcatccagttcattcttcgcctttttaacccaatctccttgagctacattatcaaattcacctttaaattttttgaaatgactacctatatttcacagctcactttagatatcgaacttgtttcttcagagttacttgttatattatcaggttttatttgatattcagtttgactcataccttgtatcctcacttggagtatattgtacagaatccgtaaaatagatgttttcttctttattttctacaaaggtaaattctatattttttgatcctactgatgatccttttaaatcaccatcacctttcaataatagtttcggcgcttgtttggttggaatatcatatctttttcttaactgttggacattataatcatcattattcaattgatattttgccgaataacttggtacattaggattatatgaaatatcaccatctttataatcattaatatctttaaagttgccatattgtacaaagaacttaaggttttcaatctctttttttaacttgtcattcggtagtggcttcgttggtatgattttattatgttccatttttaccggataccttttttcatcatcctttggtctgccgttactgtcatctgtcatttcacttataaaataatacccttttgtggttctagtattgcgattgatatagagcaccattcctctcgtttccatatccttaccttttggctcgattaccatttcagaattaactatccaagtacctttatcaccctttttaaattcttgatctcgaaagccttctttatcgtaaaaaccatcgagatttttggttggatataattttaatgtttgattaaatgtgtctttaatttgggcgtttcgaccatttgtttttgtcataatgacataacctacaatcaatataatgagtaataccaagcatataccgagcgttaatttctttgattgaatcatcatttctccaccttatatttttaatactgactcaatctttaatttatacatctaaagagaaaaattttttaacacttaatggaattttcattccaaatttctattaactctattcagtaggtttgaaattaatactatcagaaaaatagatgttttcttttttattttctacaaaagtaaattctaactctttagaccctacagatgagccttttaaatcaccatcgccttttaataacattttcggtgcttgtttcgttggtatgtcatatctttttcttaactgttgcacattataatcatcattcctcaattgatatttttcggaataacttggcacattaggattatatgaaatatcaccatttttataatcattaatatctttaaaattgccatattgtacaaaaaatttaaagttttcaatttcttttttcaacttgtcatcttgtattggcttcgttgggataatttgattatgttccattttgactggatatttttttctttttcatacgtttttccttttgtttcacttacaaaaaaataacctgttgtcctttttgtatttctattcatatatagaatcattcctcttgattttaaactttctccctttaattgaatattcatttcagagctgattatccatgtacctttgtctcctttgtcaaattcttgatctcgaaagccttctttatcgtaaaaatcatcgagatttttggttggatataattttaatgtttgattaaatgtgtctttaatttgggcgcttcgactatttatttttgtcataatgacataacctacaatcaatataatgagtaataccaaacatataccgagcgttaatttctttgaatgaatcatcatttctccaccttatatttttaatactgactcagtttttaatatttacaactaaagaaaaattattttgaacactttatggaattttcattccaaacttctattaaccctattcagtaggtttgaaattaatactatccgtaaaatagatgttttcttctttgttttctacaaaggtaaactctaaatttttgtgtcctatagatgatccttttaaatcaccatcaccttttattaataatttaggtgctttcttagttggtatattatacctctttctaagttgcttcacattgtagtcattgttactcaattgatattctgctgaataactaggtacatttggattatatgaaatgtcaccatctttataatcattaatatctttaaagtcaccgtattgtacaaaaaatttaaagttttcgatttcttttcttaatttatcatcagctatctgtttggttgggataattcgattatgttccattttcactggatattttgtatctttactttgtgcataccctttactatcttcccacaattctctaacaataaaattacctttcgttgttctagtattacgatttatatagagcaccatacttctagattccatttttttatccttcagctcaactaccatctcagaatcaacaatccaagtgcctttatctcctttatcaaactcttcgtcacgaaatccttccttatcataaaagtcttcaagatttttagttggatacaggctcaacgttttgttgaagttttctttaatttgtttatctttactactttcttcttttttcattccgcaagcccctataaaaacagatagtattatcaagcatagacacattttcaacctttttgaatgaatcatcatttcacatccccatttttatttttgatgcaaagttaagttcaaattccaatattaataatactagaggaaattttatgattaaatcctcgtggcttttaattgttagttgtatttttcacatattaacatcacaaattatttaaaaaagcgcaaatatctttataatttttattggcctaaccaactaattaattaagataaattgcgcttatatttaaaataataacactgaaactcaatgtctttacttgttaaaattgatgtttaaatacatctttactaacattcatttttcggtttacattaatttgttatatagcgatatatatcatctctgacagctttatcgagtgctaaatccatagttactacgtttgaaccattcggcattttatcttgcttctctgaaccttctatatatccagcagttcctaaataataaaaatatataccatcatcatcttttttctgtacaaaaatatacattttaattccttttgctctatgggacaaaattttctgaacttcttttgattttagcgttctattagatttagtaaaccattttaattcatcttgacttaaaaattcatcttcatattttgtgctatcacttatatcctcatgcttatcataagtgataaatattggcatttcttggcttcttatcatgtatcccatgattacagacgaaccatttttactccaattaaatattttactaaaatcttctcttgaatatttattatataaaatcagtccatttttacctttttggtatttttcattgttatactttgataattcaataagatcttctaaaaatattttaaatgtttgattacttagagcattagtaaatgcatcgcttagtcttatcattctttcattacattctataatgggacttccatagattttttcaattcctgcgttgtaaaatgaaaaatctaaaattcttaatgaagtatctatatcatcttctgttatatccttaacttcgttcaacattttattttttaattcatcatatgttaattcattttttaaaagttcttctaaaactatactatcgattcttttcaatccaggtgctatttgtcttgaaaagaaaaccagatttttagattcattttccgtcaataaagcatctatttttttataccttactaaaaattcgtaataattactaaatttagaaaatataacgcttggatctattgaatgttgttgtataaaatccattagtaacggcatgtgtcccaatctattttcaacttcttcataagcttttaatattaatttattttgattcaatgatactgcatccaatgaattgtaaatctgttttttagcaacttcttcaaaattaattgtagatactccattaatcgaatcgttattcgttaaaaacttcttataattatctttattttgcgattgatccccagaaagcgcaatcggaattaaataatttgtcttataattaccaataaaatcaattactgtaacatactctttatttgaactttttcttaaccctctaccaagttgctgaatgaatataatactagactcagttggtctcagcattacaacttgattgacttctggaatatcaataccttcgttaaatagatctacagttataatatagttaatcttaccttctcttaatttttctattacaatttggcgataattaacactatcgtctcctgttaaagcaacacttttaatcccttttgaacttagtttatccgctaaatcataagcttcttttttgctacttacaaaaattaatccttgtaaaatttcacctgaatatccatagtaatctgtcttttgaataatataattaactctttcatcagaagttaaatatctcagtttagttacatcatcttctttaataccttgatgtacataatcagtcacaccaaaataatgaaatggacataaaatatcactttctaatgctgcttgtaaccttatttcataagcaatattataatcaaacatttcaaatatacttaattcatctgatctttctggtgttgcagtcatacccagcataaacttaggtttgaagtaattaaatactcgttgataagtagatgcagcagaacgatgtgcttcatcaaaaacaatataatcaaattctttttcatcaaactgcttaaaattatcatctctagataatgtttgaattgttgcaaataaatatttggcatcgacatctctatgtttgcctgtcaacaatccaaaatcactatcattttttgtaggtaatacttttttaaattcttccttagctctatttaaaattccctcattatgaacaataaataaaaatttattagggtttacttctctaacatctaatgcacataaaatcgttttacctgtaccagttgcagatattattaacgccttatctttggctttatccctaatagcttttaatgaccttaatgcttctgcttgcattaaattcggtacaatttccactgattttttcaccttatcagctagcagcatttgagtttgttcaacctccgccaatttttctaaggagcggtactcaaatgattctttatatgaattaatccattgctgagtcagttgggtactgttttgccataacaagtcaaattcattttttacactatcaaccaaatccccatttttcatagtagacagtaaaacattatgctcataattaacctttaacgcattcgatgttaaattagagcttcctattaccatagaactataatccttatgttcaaaaatatatcctttggcatggaatccagcaatatcggttaatcttacctctacattttttaatttaagtaattctccatacattttaggactattaaaccctaagtaattagatgttaatattttccctttaacacccttattgcttaaatctaatagttgagcctttaagctggctaaaccgctttctgttataaaagccacagaaaaatagaacgtttcacatttttgaagttcatctataattgttgaaagaactttttcatttttattatttactaaaagcttcggtgtataattccctttatgagaaatatgtttgtctataaaccctttatgtaaagattgattgaaatcatttagtaatctactcatattatccctcagtcataattttattaacggctggtatatccgctggggcccaatttaatttatcaagttcgtttattgacaaccattcaatactcttatgttcagttagagttggtaactctttgtttaaagtacatttgtatgttgttaacctaacaattccaaaatcatattcatgttctgtagttataactttgtctccaacaattagatcacatttcatttcttctctaatttctctaatcaaagcgtctttttcagtttcattcttttcaaccttaccgccaggaaattcccacattaaaggcagactcattttttcacttctctgtgcacaaagaattttgttatcagaaaaaataatagctcctactacattgattacttttttcataagactcacccttcaatttaaaatcatcttaattgttattctatcaaaaattacaaaactatatataaatcaatattaaaaattaatattttacattcacatgaacgctctactccatgcattttcatacacatctattatataatacttgtgaaaagtattgtcttggggctgtgtttttttacttttggggcgtatttctttataattcattacataaatgtaagggctttagttttcatgttttattaagtctaactgagattttgaaaggatgtttagcaacaatggataaagagttatggataaaaagagctaatgatagtttagttaaacatttttatgagcaacaatctgacattgaacagcgagaaggttttgaaagtaaattaacgtttggtactgcgggtatacgcggaaaattcggtcttggtgaaggtcgacttaataagtttactattgaaaaattggcattaggtttagcgcgttatttaaatgcccaaacaaacaatccaacaatagtcattcattatgatattagacatctttcaactgaattcgcccaaatcattgctaatgtattagcaaaccatcaaataatagtttatttacctgatacatataaaacgacaccggaattatcgttcgcggtgcgcaatcttaatactactgctggcattatgattacagcaagtcataatccgaaagactataacggcattaaagtatatagttctgatggcgcgcaactatcgaccgatgcatctgagcttgtaagtcgttatatcgaagaagttggcgatccattacagattgatatacctatttcaaaacaaaatacatcttatatcaagcctttcccgaaatctgtaactgatgactatatgaaacacattcaaaatatgattggctatattcctaaatctgatttacaagttgtgttcactagtttgcatggtacaagtgttccgattgtacctgagttattaaaatctttgaatttcaatcaattcaatcttgtagaagcacaatgtaaacctgatccgaattttagctcagttcaaagtgctaatcctgaagatcatcgcgcttttgatcaagcagtcgaacttgcaaataaaagtcatgcagacttattaatatcaactgaccctgatgcggatcgtcttggtattgctgaacgtgatgcacacggtcatatcacatattttaatggcaaccaaattggtgcgctgttacttaattatcgtattcaacaaacgtctcaattacgtcaccgcttaatgattcaatctattgtaagtagtgagttaacaaagtcattagcacgctataataatgttgaatacaaagaggtgctgacgggctttaaatttattgctcaggaaataagacaactggacgatcatcaaaatatgattttcgcatttgaagagagttacggttttctatcagagccttttgtacgtgataaagatgccgtacaaattgtgccactcattataaaatacgcttctgagttaaaattatatggcaaaacattgaaagatgaattagaacagatttatcaaactgttggtagacatgaggatacattattctcgcatacgctagaaggtttagaaggtaagaaaaaaattgaatcaattatgacacatttccgttcaaatccaccgcaagagattcaaggactgaaagtgaaagcaattgaagattatttaactagcgaggtttatcagttggataaagatacaacgtcgcagattgattctcctaagtcaaatgttattcgtgtcttatttgacgaaggatttatcgctttacgtccttctggtactgaacctaaaattaaattatatgtgtcgttaaaatgtccggattttgatgatgtagctcaaaaaattaatgcgatgatttttagctaattaaaaattttaaacatcgaaatattacatttcattttatacttatcagcccttttgaaactagaatccttatgttttcgcgttttgaaggggctaatttgtaataatttttcaaaagtatattagaaaattaattttcatgtatttttcatattaagcggtaataatataataattaataccgcgacctatttaattgttttcgcgatgaaaaaggtttagaattacaaaaataactattttaaatttagttacaaatatattttagaaaggatgtgaaataatgaaaggctctaaacaaatacttttgattatgggcattatatctcttattgttttatttatttttacactattcatcatggcacaatatgcaaaacattatgaacaaaaatccgacagttccaacgcacatactttaaattcatcatcagccataattgagcaacatactatgtcgaatttagcgtctctagatttatacgctcctgttcgtaacattacttctagtcgtgatattcatcccatttatttcatgacaaaagattaaaacttcctttttcataaccccattcattcaactaataaattaaaaattgataaaaacgtactgttttttagaaacatacatatataagaaacgcatcaatcactaaaagacagtacattatattctatcgggaaggtgcaacaatgaccgtcaacatcgtattttctatcgtgttctgtatcagtatggttatattaggcatttatgtcgcaataactaaagatttcacactaatctcttttataaatcaaacgaccattgcagataaacacaagacccaaattgcatatatatttgcgctatgtatcagtttgagtgcagtatttttaatgtctgcaattctatgcttcgaatatgattttattgcattgtcattcttatttttaacgatagcattattacttatcgcattattctacgtttgcttttataaaattacaaaatatccataaatgtttgtgatagtgtgttggttagatttaatggtgcgctttcagcaagcaattgtttgcgaaaaaaatacaaccttgtacgaatacaaagttgcattaatatagaatcatttatgctttttaatgttataaacctaattctttaataaatcgtgttaattcttctcgcatactgtcatctttcaatgcatattctatggtagttttaacgaagcctaatttttctccaacgtcataacgttcgccttcgaagtcatatgcatacacttggttatcattattcatacgctcaatcgcatctgttaactgaatttcgttacctgcgccttctttttgcgtttttaaataatcgaaaatttcaggcgttaatacatatcgccccataatagctaggtttgatggtgccgtaccttgtgctggcttttcaacaaactttttcacttcatactgacgtccatttttagttaatggatcaataattccataacgatgagtatctgcttccggaacttcttgaacacctataactgagtgccccgtttcttcataaacgtcaatcaactgtttcactgctggcacttcagattcaacaatatcgtcacctaataataccgcaaatggttcattgccgataaattgacgcgcagaactaatcgcatgccctaaacctttttgttctttctgccttacataaaaaatattcgcaagttccgttgaatactgaactttttctagtaattcagatttacctttttcttttaacaccatttctaattctttttgactatcaaaatgatcttcaatcgcgcgtttgtggcgacctgtcactataataatatcttcaattccagctcttgcagcttcttcaacgatatattgtattgtcggtttatctaagataggaagcatttcctttggcatcgctttagttgctggtaaaaatctagtccctaaaccagcagcgggaatgattgccttttttatttttttcaaagttaatgtgctccttttcctaagtattaaatctatgtatcaacgtcattttaacactaattagaacgccttcatagtgtcattgagtatgtaattatttcttgggaaatttgatttaattttaaaaaacaggcttacttcatataatttatgaaataaacctgtcaattttagattgattatgctttgtgattctttttatttctgcgtaataacgctaaacctagaatgctgaataatccgccgaacaacatacctttgtttgttgattcttctccacctgtttcaggtagttcagatttcttagattgtttttgtttagttggtgccactgctttaaccttttcattaatttcaataacaggtgttactactttaccttgttccactggtttagaaggctttttaggttcttctttagcaggtggtactggtttaccaggttcagctggtacctctggtgttggtggtgttggcttacctggctcacttggcacttctggcgttggcggtgttggtgtgcctggctcacttggtacctctggtgtcggtggtgttggcggcgttgtatcttcttcaatcgtttgttgaccttcgttttgaccgcttacttttggaagtgtatcttcttcaaaatcaacactgttgtgtccaccgaattgataattaggtttatctttgtttgtatcttcttcaataatttcattatgcttattgaatccatgaatttgtggcacactgtcgaagtcgatatcaatgatgttaccaccttgttcatacttaggtttgtcttcttctgtgtcttcctcgaatgactgattaccgctattttggccaccttcgtaacctaattcactcttaatatcaacatggctattttcttcgatttcttcaatcacgccataattaccgtgaccattttcagttcctaaaccagaatgagaaatatgatgattgttttcagtgatttcctcgactggcccttgtgcttgaccatgttcttcaggtagttcatctactagttcaatcagattactttcagttgtatattctttcgtatcttcaactgttgtatggtcgctcactgcgccagttacaataccttttgtagactcttcgtcaaattcaactaagttagattcagtagtaacctgaccgccacctgggtttgtatcttcttcatattcaacaacatcagcgtgatgttttgaattttcatgtgtcgattcttcaaagtctacatgaatagaatcttcttcagtttctacaataccttcagcatgaccttctgcaccttcaacagctgtatgatattcaaaatcaattggcttagaatcgttactttcttcgattgtaccagtcaattcatgcttctccactggcggctctgatttaatgtctaattcaattggttcactcttatcaatgataggatcatttggtttatctttaccatcgccttgagcattattagagtaaaatgcaacgccgttgttccaagttaattgaactggataatacgagtaataaggatagtatgggtaatttttatgataacctgaaagatgtgttcggaaatttagatccttagcattttgatcatattcaccttcatatttaattacatagtcattcgaattatctaaatcgctaaggttcaatgtgtacccaccattacttgtgtaagatagatttactttctcagtcacatcttcaaatttattgacatcatcaagctttgcataaacactttcagctaattcatccgaaccaatgtgtttatatactttgactgttggcttattagcattttgtttatatccagatgttacttgaccagttactgtgacagagcttaacgactggttgttaggtttcacatacgcaaaatggctaaatttcccatctgctttatttaaagtatcaattcgcccattaacagtaacacccattctatctttaacaccgtctaaatatttgatatcgaactctttttcaatcgttttatcacctagtgttacttcgactttttgttttccttgctttgtcactgttgtagggtcaataaatagatttaaagataattcagcagttaaatcttttttgttatctatataatcagtaaatgtataacgaattttacgttcagctataacttcacctattgccataactttatcttctgttgaattttttatctctggaactttacgcagtgttgatataccatgtgtttcaacattatcacttaatgtgaaatcaaaataatctcctgccttaattccttctccaaatttccatttgtattttaaagttactctttgagcattatgcggattaacaatattcgaatctttattatgtccttctaaagagctttcagtaactttcactttacttgttacatctgtacctgtcgctttagcttctcccactacttctttctctgccacttctgcaacgtcagccgatcttttcattcttggtttaatttctgagacgttacttggttgagctgtgtcaacttgagttcctgtagttttcttatcagcaactttttccgatggtaaatcttcttgtaatttcatttcggtttctacttttggtgcttgcacagttgttggtgcttcttctgttgttacttgtgttgattgtgatggttgctcagttgatgtcgcgctgtatgattgtgtttcatctattgtattaacgttatttgtagttgtttgtgtttcgcttgctttactttcagtagctgaactcccactttcctctactgtagtattgttttgttccgatgctgcagcttctttttcttgtcccattccaacaacgatcattgttcctaagaatactgaggccgctcccaatttgtgttttcttatgccgtatctaagattgcttttcactataatattctcccttaaatgtaaaattcatttattttttaactcaataaatgcaattctatattgttcggtttttaaaagcaataaaaaaaaccgagttaataaaaagttaagattgttgttaactttatgtataatgggttttttattatttggaacacacatatatattgcataaaaaactcttgaataccttgatataacgagcttgtattttttatacttactttttaaattaaattcaaattcatctaatttaaaacaatatactaaagcatacataataatcgcctgtacaatgcatcattaacaagtcactgaaacgcctttcattgtattaataacgtcactataatttttatatcgttcggtttttatttgattttaatgattatttatacagaaacagccgtatttcaagacgacattttaaatttaactaaatttgcatctagttaataattgcatttatcaaatttgtcttattgatccaatctaatttgtacttacaaactagttttaaattctaactttatctctcagttcgttatcaatcatcagacataaacagatgaagcaatcagaaaacactctaattttctatgtagaaatttgatttaatctaaaaaaaacaggcttacttcatataaattatgaaataaacctgtcaattttggattgattatgctttgtgattctttttatttctgcgtaataatgctaaacctagaatgctgaataatccgccgaacaacatacctttgtttgttgattcttctccacctgtttcaggtagttcagatttcttagattgtttttgtttagttggtgccactgctttaaccttttcattgatttcaataacaggtgttactaccttaccttgttccactggcttagaaggttttttaggttcatcttttgcgggtggtactggtttaccaggttcagctggtacctctggtgttggtggtactggtgtgcctggctcactcggtacttccggtgtcggtggcgttggtgtttctggctcactcggtacttccggtgtcggtggcgttggtgtttccggctcacttggtacttctggtgtcggtggtgttggcgtttccggctcacttggtacttctggtgtcggtggcgttggtgtttccggctcactcggtacttctggtgttggcggcgttgtatcttcttcaatcgtttgttgaccttcattttgaccacttacttttggaagtgtatcttcttcaaaatcaacactgttgtgtccaccgaattgataattaggtttatctttgtttgtatcttcttcaataatttcattatgcttattgaatccatgaatttgtggcacactgtcgaagtcgatatcaatgatgttaccaccttgttcatacttaggtttgtctttctctgtatcttcttcgaatgactggttaccattattttgaccttggatttgaggtacactgtcgaaatcgatatctacgatattaccaccttgttcatatttcggtttgtcttcttctgtgtcttcctcgaatgactggttaccgctattttggccaccttcataacctaattcactcttaatatcaacgtggctattttcttcgatttcttcaatcacgccataattaccgtgaccattttcagttcctaaaccagaatgagaaatatgatgattgttttcagtaatttcctcgattggtccttgtgcttgaccatgttcttcaggtagttcatctactagttcaatcagattactttcagttgtatattctttcgtatcttcaactgttgtatggtcgctcactacgccagttacaataccttttgtagactcttcgtcaaattcaactaagttagactcagttgttacttggccaccacctgggtttgtatcttcttcatattcaacaacatcagcgtgatgttttgaattttcatgtgtagattcttcaaagtcaattggatttgattcctcagaggactcagtgtatcctccaacgtgacccgcttcgctatccacagcagtatggtaatcgatatcaatagctgatgaatccgtttcttctattgtttcaatgtatccatcaacataaccaccttcaccatctatagctgtgtggtaatcaatgtcaagcggtgtattgtcttgattttcttctgtttcaataatttgcttcgcatcgtattgtccgctgattgaaccattaccactatcttcagagaactcaaagttattggagtctacgattggaccatattttccatcaccattagctttattactatataaaactaatccattatcccatgttaatgtatagccattgttataataataatatgttttatagcgattttcagggtatccagttaattgagttctaaagttcacttcactcgtaccatttaagtaatctccggtgtaatgaattacatatgttttatctaatttgtcaaaatttaatgagtagctaccattgttttgtactttcaatttatcacccatttgattcgttacatctttcaattgtgtgctgtccactgtatttgcataaacactttgtggtagcccattttcaactccaacatactcatatattttaacatttggttgtgttccattctcattacttccttgtgtcaacatacccgttacagtaacactatctgaattgtttccatttataggcttaatatatgctacgtgtgtaaatttatttttttctttgtcaaacgtttcaatcgaaccatttacatttgtatattgatttttaacaccatctttatatgttatttgcatagttcctgatgtttctttgccatttaattttgaagttattgtttgttgtccattgctttgtacagttttaggatctatgaataagtttatttctaaattagctgtaacatttactttatctttgatgtaatcagtaaatgtatatctaattcggccattatctaatacctgacctttagccataactaatgatccatttttaatatctggaacttttcttgtagttgctacaccatgtgtatttacattatttgataatgtaaaatcaaaataatcgcctgttttcaacccatcttgaaatttcagtttatactttaatactacacgttgcccttcatgaggctgaacattatttccttttggcgcttcaattttactttcatcttccactgtaactttacttgtcacatctgtacccgtttccactttcgcgtcactagcttccttagcttccgctacatctgttgatcttgtcacacgtggcttactttctaatgccgttcttggctgtgccacttcaacttgtgtttctgctacttgattttgtgtagcctttttaggtgttaaatctacttgtctttgatctccgctattgtcttgagattgtgtcgtttccttaacttgagggttcgcttcttccttaactacctcttctttaactgtttctacatttgctggttgtgcagtttgtggcgcttgtactgcttttggtgcttcttcagttgttacttgtgttgcgtttgacggttgttctgttgctgttgcgctgtatgattgtgtttcatctatagtattaacgttagttgtagttgtttgtgtttcgcttactttattatcagtagctgaattcccattttcttctactgtagttgtcttttgttctgatgctgcagcttctttatcttgtcccatcccaacaacgatcattgttcctaagaatactgatgctgctcccaatttatgttttctaatgccgtacctaagattgtttttcactataatatctccctttaaatgcaaaattcattaatttttttaaacttaataaatgcaagtctatattgttcggtttttaaaagcaatacaaaaaagcgagttaatgaaaagttaagattgtcattaattttatgttaattgataattttattatttgaaatatacttataaattgtatccaagtcgtcagaaacccttgtcacacaaggcttgtattttttatacttattttttaaattaaattcatcattatctaatttaaaacaacatactaaacgtttcataattatcgcctgtacaatacgcacaaaaacatgtcttgaaacgcctttcattacactaaaacaaccaatatatttttatatcgttcggattctgagtatttcagacgattttctgcataaaaataaacgtgtttcgaggcaatatattgtaattacctaaaaacacgtttacttaatatttagttaaacaaataagctgatgaataaaatgaagatgatacctgaaacggaaataatcgtttctaataatgaccatgttaggaatgtttcttttacagttaaaccaaaatattctttaaacatccagaatcctgcgtcattaacatgagacaaaatcacactacctgcaccaatcgctagtacaactaatgcaacatttacatctgatgattgtaataatggtaagacaatacctgtagttgaaatcgcagctactgtagccgaacctaatgcgatacgtagcacagctgcaacaatccaagctagtaaaatcggagacatctctgtaccttcaaacattttagcaattgtatttccgacaccaccgtcaattaatacttgtttaaatgtaccgccaccgccaataatcaataacatcattccgattggataaatcgcattcgtcactgattccataatatgattcatcttacgttttctcattaatcccatcgtaacgattgcaaataatactgctattagcatggctgtccctgctgttccgatcatataaatgatagattcaaatagatttgtaggtttgtcgtgcccggttacaagttgcgttatcgtagacactaacattaatatgactggtaatgttgctgttaataaactcataccaaatcctggcatctcttgatccgtaaattctttttgtgcacctaacgctgaaatatcgccttctcgtgtatacgcagacggaatcattttttgtgcaactttgttaaatataggtcctgcaatgagtgtaactggaatggcaataatcataccgtatagtaatacatctcctacattcgcctttaattcttttgcgatgactaccggtcctggatgtggtggtaaaaagccatgtgtcactgataaagctgttaccataggtaatcctagttttaacactgaaacatttgcgcgttttgctactgtaaatactaatggaatcagtaagactaaacctacttcaaagaacaatgcaatcccgacgataaatgctgcaacaagcattgcccattgtacatgtttttgaccaaatttttgaatcaacgtgtctgcaattcgagttgcaccaccaccatcagcaagtaatttcccaagtatggcacctaaaccgaatatcagtgcaatgtggccgagcgtactgcccatccctttctcaatcgtctccataattttagtcaatggtatacctagcattaacgctgtaatcatcgatgtgataattaatgaaataaatgtatttaatttaaacccaatgattaatactaataaaataattatacctaaaacaacactgattaacggccatatttcgttaaacatgacattcccctctttctcttttcaatagaatgtaacaccgtcgtcgcgcacgtattccacataatatatagtagtcatggcacaacaactttatctaagatgcttgagtgacgtatttattgtgttttattttcagccatatgtttgcgttgaaaatctgcaatttgttcataattctctgttaaagaacgacttaaattgataaaaatggatacgagctcttgataaacagcgacattttcttcaatcggcgtatgattgtttgtggcaccgaccatcgatgaaacgattgaaaaatcttcaatgtcacctacagctttaagcccgagtacgcaggcacctaagcatgaactttcataactttcaggaaccactaactctgtgtcaaatatatctgacatcatttgacgccatacttcacttttcgcaaaaccacctgttgcttttatcatcttaggtgtttcattcattacttcaataagcgcaagatagacggtatacaaattgtaaagaacaccttctaatgcagcgcgaatcatatgttcttttttatgagataaagttaaaccgaagaatgaacctcttgcatttgcattccaaagcggtgcacgttctccagctaaatagggatggaatattaaaccatctgcaccttgtttaacacgctttgcaatttgagttaaaacatcataaggatcaacaccgagacgtttcgcagtttcgacttcgcttgctaacaactcatcgcgcaaccatctcaatacgacaccaccattatttacagggcctccaatgacgtagtggtcctctgttaagacataacaaaatattctacctttgtaatcagtacgtggtttatctatcacagtacgaatcgccccagatgtaccgattgtgacagcaacttctcctttaccaacactattgacacccaaattagaaaggaccccatcactcgcaccaataacaaacggtgtatcttcattaagccccattaatgttgcataacgttctttcatacctttcatcacatacgttgttggcactaattccggcaacatttcctcggaaataccaagcaattctaatgccccaacatcccaatctaatgtttctaaattaaacatccctgttgcggaagccattgaataatcaatgatatatctatcaaataaatgatagaaaatgtatgttttaatatctgcaaacttagcagttcgttgaaatacatcttgccattcatgtttcatccaaaaaatcttcgctaatggcgacataggatgaataggcgtacctgttcgctgataaatcgcattgccatcatgcacttcatttattactgttgcatattttgcagcgcggttatctgcccaagtaatattatttgttaatctttgatgttgctgatccatcgcaatcaagctatgcatttgcgcactaaatgacacaaatttaatatcatcttgattaactttcgattccctcattatgtatttaattgtcattaataccgcatcaaataattcatctgggttttcttctgagacatcaacgtttggtgtgtgtaaatcatagccgatttgatgtttcatgatgaaagttccattttcatcatataagactgacttggtactcgtcgttccaatgtcgacaccaatcatatatttcatgacaaatccttctttcttttcattttaattcaaccaaaatccttcaatatctttaccaacatcgtcgaaatttaaatgaaacgcttctttcaaaatttgactgtcgtattgttccactgcatcaataaacacttgatgattatgatgtatgcgttcaaaatcttgcgggttttgttgcatacgttgtcgcatggatgttaaaacgagcgccatcattactggttttaaatgactccaaaatgagtttaaatattgatgattagatgctttgattaatgtttcatgaaattcaaagtcatgcttcgtaaatgattctgcatcctcaaattttactgccactttcatcatttcaagttgtttcttcatttcttttacgataggtagtcgctcttgatttttaactcttgaaaatgcaaatgactctaacatcagtcgcaaatcgtacatttctttcttttcttgttccccaaacggcaacacatgtgcacccattctttctaattggatgagttgattttgttgcaataatttaaatgcatctcgaattggcgaacgactcacattaaattgctttgccatttgattttcagtgagtaacgtaccttcagctatgtgaccattcacaatgcctaagcgtaattctgctgcgataccttctccagttgtcataccttccaaccatttctctggatatccatacatcatcaaagccactccttcattacacgacatacttgtatacaagtatgttaatatagttcttaagtgtttgcaagcgctttctttacgcgtaataaaatagtgaccacccctcttcaatgtaaatttaaagggaatggtcactatcacacgaatgatttaattgttatgttgtatgtgggatgtgtctaattattctgtacccatatgtgttttaggtacttcaatgcaataatgcgtttcatgacagtttggacattcgaatcgacgtgttgtcgcagtatgtttcgctttgataactgcccacaaagacggtgagaatatatgctggcagttagggcataaataggcaactttgcgttgatagtagatagtaataccaatgccataaccgatcataaatggtaaagcaattaagaacggccatttgtttttcatcaagattgaactcaaaatgctagaatattgaattattcctataataccagcactaatccaaatgttacgacgaatacttttcatttcagctgatttactcatgacatgctctatgtcttttaaatgtgtgattggagacgtcgacgcttcatttacgtaatattgaacatttttaattttgtctaataccgcttgttgctgtttgacttgttgattaatttcttgttgtttcatagttagtaaggtattgagtgtcttcaaagtaccttcaccttttagcaacatatctatatcgcttaacgcacaacctaaatctttaagtaataagattaactctaatgtttgtcgctgttgttctgtatacacacgacgctttccttctgtaaatccttgtggtttcaaaatacctttgcgatcataatattgaatcgttcgtgttgtcacattgcataattttgcgagttctccagtcgaatagttagacatagattccacctcctacaatcaccatagttgatgacccgacgtcacgagcaagtataatttccacatttttaagaaatttattatactaggcgtcttatttttgtgatttcataccatgttgatttacaaaatcactcaaattaagcaacacacctactaaacgtctactctgttatttcagaatgaatttgttgtaatttattttcaacttcagtaatctctgtcgcacattctttcaataaatctcgatacttttccgtctctgccttgtttttataacgtattttatgttctaaacttgcccacatatccatacctattgttctaatttgaatttcaacaggcaatacctcaacgcgttctgctaaaaagactggaatggatacaacgatatgtaaactgcggtaaccattttctttagggtgctgaatataatctttacgttttatcaattgtacgtcttcttgtttaagcaacatctcttcaatcaaataaatatcatctaagtaattacatactacgcgaattcccgcaatatccagtatatgttctttggcagtttctgcgctaatctgtaatcctttacgattaagcttttctattaaactacgcatttctttcacacgtcgctccatatgatgtataggattgtgtttataaatatgattgaaattgtcatctaaaatactcagttttgtgcttatttcctttagtgctgatgaataaatatgatctaactctacgaaacctaataacgtatcaaatgcttcatcaccattttcaaatttacttaaactatttttaaaatcatgtcgcaaatcctctaaatatagtgatggttttcgatctacatacatttttatacttacctccgatatataatcatctttattgtacctaacattttattaagataatactaatacactatcgaactttgggctgatactgaaacagcacaaagaaactcaaacaattcgaattatgtatcaaaaccttcaattataggaagtaattttaaaatgatttaacgcaaaaaaacacctgttaccgttatataggtacaagtgcttaattgatagagatgttatacgtctttaaatgattccacaacttttggatgcggaccatccataagcggttctctttgtcgaacgccaccactttggttgccaattgattcgctatcaaagtacgatttatcttgatttgattgttcttgaatatgttcttcattatcagttgttgcatattcactatccacctctggtttttccattgttgctgtatggaattgtacgaagttctcttcttctaatgctttgatttcttctttcgataacgctcgataccaatctttcgcttttttcgccgcaataggaacaacatctttttcaagatatccttcttttaacattgcattcgcaatttctatcgccttttgccgtttaattacttcaaattctttccatttttcggggtaacctttcattgtaaagggcatttccttaacctccaatatgttataattcatgttatataccaccataattataaaatgaaacatattaaacacaattttttagactcccgtcataataacttcagacaaacgttagtctgacctgataaataatttattttaaacgttcttgtctctctcacgaaaaccattgtgttgaatattcatcattgctgattgaatataattatactgtggtaaatctggtaatatctttatttctaattctgtatttaattctaaatgcttagcgatgttttcaaatgttgctaaatactcgcccattaattgttcatttattgtaagtctatcttcattagccatggctctatttaacataaagctaatttcttctaatgcgaataagctaggataataattttgaatcaatgttttatcactaaataattcaccattagctgcattataaacttgcgtcatattatttaatttcacagataggttcatagccgtgtttttctgatacacatcatctttatattggttttcagaaaataaataatggaagagcgttgcttctttacgaacaacttcagccattacataaggaagcaatgcggatgcggtacgttgcccaaggacaaataaacctatgattgcaatcacaatacccattgcaacgtcaataactcttggaaacgcaatgttaattgttaagttctgtgatgctaatccgttcattaaaataacttgtattgtaataaaaactactgcaattgtataatttgctcccaccaacgcttcagtaaataatgctgcaatgcccattaaaatgactgcaacaggtgttggtattgaaaacaacaatataactgaaagtactagcacacctaaaatggtgcctaatccacgtgccatacctctctcaattgcatgtatagttgatgttcctaataatactgtatgtgcggataaaggtatccaatatgctttttcaaaatcgaacattaacgcgataaatatcgctatcatcataatcgctgcatacctcaatgtatttctaaacacgattgaatctaatgttaaattttgataaatacgcttactatataaaggttttcgcatttcagcttcatatgcgatacgtgcttcatttgcatgcaccatttcgtcaattttcaagatatggttgaataagttttgaaattcctctgttactgttacttctttgcgccaatatctcacatttttattgcgatcatctcgctgtgtaatgatatgatccatcatttcaattaactcatctggcaatggtctgatttgtttagcattcagctctaataattcagaatatatcccttgtgctgatgtgtgtaataacaataatttttggaaacgtccgcttaatttatcactacttgaattagaagtgatgagtagtttatccgacgctttaaaactatccaccgctgtttttgctacttgtgaaaatgcagatttatcattgtaagcatgcaataacttagatatgagtttaaaatcgttttgaatggcttgttcttcagctttgtttttagacaataagattgtgatgagtaccatcatagtggcaagtacaccacctactaaaatcgcaaagcctctatataatgcttcttcaggtgctataggtaagttaatgggtaaactgaatgtcacaatgaagaatgtcgatgacggtccagcaattttcaaggcggtaaatatataaaatggtataaccgtaacaattaataatgtcattccaaaaacgagcggcgttgtggctgttagcgtaccaagtatcatgcatattgcaaacgctaaattacaaattattacagttcgcagcttagatcgcgacggacctttaaaaacgtagatatgtgctagagttccggttgcaactaataatccaaattggaaattaccacataagtaaccgatgattgcaggaataatcattaacagtccttgtcttatccctttataaaagtctaagttaagtcgattaatttttataagtgatgtcaaaaagatgtcatttcgacttctcccttcctcgtcaaaatatttccataatcattttattagcatagttaatttgagtatgttgctataaatttcaattacgcaacatatgtcattataacaccttatgctcaattatctaaatttaaaaacttttaaagtccaattaaaattattttctaatgttatttaacatcgttgaacctttggtcgcccacctttgcgctagttaaaatttatttgtacttttacaatagttacctgactaaggttttaaaactttatttcttctacatatattattttaataacttcccgttcatcttaaaccatatctgttttaaaatttttcaatttcaacgaaaaaagcaataagccccaactatgtgaaagcttattgcatgattaaattatttttctattgctttatcatcactaacaattaaaggttgatctggtttcacatagaaccacataatcacagcgattactgctggaacgattaacaattggaatgtcattgtccaacctaaatgttctacgaatagacctgctaatagcggactgattaatgcacctatattaccccataagttcatccatcctgatactgtaccagagaagttacgtcctaaatcagttgctgctgcccaactcatacccattgaaataccgataccaccaagacctagtgataaccagaaaatacttacatataaatttcctgtacgtacagcaaagataattgaaactgcaaatacaataaatcctgcgattgcaattacacctctagctacgaattttgaacgacctaatcctaatacacggtcagaaattgcacccgctgataagattaagaagaacattaataaccaaggtaatgaactaatgctcatttctttaaagttaacgtggaatacttctgttaaatacgtcggtaaccaaattaagaataatgtaatgataaattgtacaacaaagtattgaattgcaattgcatagaagctaaaacgtttaaagaaatcattccatggtggtgatgacttttcagtagctacgatatcacggttttccataatgaaacgtttctccgcttcattaaccattctatgttgctcaggtaagtctttagcaataatcgcccataatacagccattaaaatccctactgcaccaaaaatataaaatactgcttgccagttaaatgcgttaacaatagcaattgtaactattggtgctaatacaggtccgaaatatgatcctgctaataatgcacttgatgctctacctttttcatttttagagaaccaaaatgagttaaacacagcattagaagggtacattggcgcctcacctacaccaaataagaatctcactaaataaattaaaccgtggttcttaatcatacccgttaagattgtaaatgcactccaccaaactaatgcaattgtaatcatcttacgtggaccgaatttttcagccaacatccccgatggtacttgcattaatgcataacctagagagaagaatgatgccaataaaccaaattgtggttttgtcatccctaaatcatccatcatttgcttagcgatatatgaaatgtttgctctatccatatacgcaataaccccaataaagaagaacgcaagcgcgaacatccaccttacgttagttcgtttttccttcataactattcctacttccctaattaattttttaaaacttaccctgaaacgttaaaattttcggacatctggcatgtccacccctactttgtcacaaaattgtaccaaagttattttttataatattatcagacatggaaagcgtttacaatagaatctataaaaattttattaaattccgcttaacttttgctattaaaacgatataaaggaacttttagttacatagtagcctatcatttgttaattaaaaatactgcaatactagtgttttaaaacgtatattgcaggctttcttacatatttgacattcattttaaattgcataaaactacattactcattcattgtgcagcgcctgttatttagatgatcatttgttgacttttcgtacttatagcaagcaattttttgatttattgcttataatacattttaagacaaatgcttgtttcaacatcgcatacgacatcattcattattcatttgaatttatccagtttctatttgtctgcaattgctgaaaattaaaggagcttatttttaataatggaacaaattatcactgaatttattagtcgttttgggtatgcagccatttttatattaattttattagaaaatgttttacctatcgtaccatcggaaattattctaacatttgctggtcttatgtctgttaaatcacatttatcaattttaaccttatttattattgcaaccatcgcatcgtttataggactgttaattttatattatatctgtcgtttgatttcagaagaacgtctatatcgctttattgatcgacacggtaagtggattaaattgaaaagtaaggatttaaagcgagcaaatgattggtttaaaaagtatggcgtatgggctgtatttatctgtcgttttatacctgtattacgtgtattgattaccattccagccggtgtaaaccgcatgaatgttgtgacatttaccgttatttcattaataggtacaacaatttggaacttcggtttaattttactaggacgcacgttgagcgatagctttggtatgttgatgactggtcttcatacatattcacgtattatgtatgttgtcatcattatcgcagtcatttactttgctatacgttacattggcaaacgtaagagagtaaaataatattgttgttagcataaagaagaacctcgaatttattcctccgaggttcttctttatatttttatataatttcataataatgttacattttttcagttaagatttccaatcttttttgtcaactaattctaaggagctcaacacctcaagattaattataatattaaaatcttttcatttttaaatatcacttactgtttttccaattataactaatatgcacttttatattataaaattaactttaatatattttttacaataacaatactaacagcaattattattatactagagattttatttaaaaataatatatatttacctgttctatctatagaacctaaaaccttacctaatattgctaacagaaaaaaccatagccaagaaaccataattgtggcaatacaaaaaagtatcttttctaaaccagaatagacagatgcgcttgatccaattacaccaactgtatccataattgcatgtggatttaacaacgaaacagatatagcaaaacctatttgcttttttgtactcatcggttcatagttctctagagtgttaggcttttctttccataaagaccaagccatgtacaatagaaaaaacaaaccaactatataaataaataattgtagaactggtaatgacattaatattagtgaaacacccagtacagcaattattattaaaaaagtgtcacataatccagccgttataacaaccggcaatgcgtttatcattttttttgattagcaccttgattaaatacaaacacgttttgcgctcctaggggcaaaataagccccaatgctaataaaataccgtgtaaaactggttgtatcaattcgcatcctcccccttcccaacaatgttcggtgtacaaatatcttttactacactataaaaacccggtagtgtcgtcttgaagaacccagtacaatggtgtgcttctctatatttttgatctttcattaatataatatgtgcttttttcaaattataatgtggaattgctgggaataaatggtgaactaagtgaaaattatcatggtgaggatgaaataaaaatattgtccaaggcataccaaaagtattccgacttgctgttaactcactatcattattcaatccagagtgttcagccatttctgcccaataacgaataatctgaaaagttgttaaaagtggtataaaccaataaagaataacatataaccaaaaattaaacataattgataacgtaataattgttacccagaaaatatttctagtccatatttctgatttaggtgtatccctactgtataagttagctgaaactgtacctaaaacatatttaggcacatggaataaaaatagtacctttacaatgtgattaattataaattttttcacatctttttgcggcttatctaaacctacaatgcgatatcgtttagtatctgggtctttttcctcatcccataaatttctatgatgtttaaaatgagaattacaatatgtagtaaagcttgtaaatatagggaatgctactaaaagacaagcaatccatttattataaaacttatttgtaaataatgaacgatgacatgcttcgtgcattaagttatcaaacgccctcattcgacttccaattaaaataatacttataatataaataatgagattactcatatagatacttatacatgcactcccgagaattaccaaccagtcaaaaatcaaagcgaaaatattgtggtaattatcctttttcattaataacttcaaatctttttttatctccattgaaaatacagctttttctaattttagtgtcaatttaaccgcctcccttatttaatatgttataataatctgaaaattaaaaaacctaccagattctaataaaaattccaaccagattgaggatgacatttatgactaaatttcaatataaaaaaattattgatgatattattaataaaattaacaacggtattttatctcctggagataaattgtactcgcaaagaaaattagctaagtactataatgtaaataaatccacagttatacaagctttagatattctaaaaagctatggcatcttagatacaattgaaaaaaaaggtatttatgtatcccagtataaatggaattcttatattaccaataatattcattggcaagattatataggcaacagcttttctaaaaataaccagtattatattcaaaaaattaatgaaatagaatttaatactgatatcgtccgattaggtactggagaactatcaccaaaactaattccaaaccatatatttaaaaaaatattaactaatgatattgaagaatctttacaaactaactatgaagaacctaaaggaaatctaaagttaaggatagaaatagtaaagtatatgaagcgaagaggagttgattgtaatatcaataatatatgtattacatccggtgctgtacaaggtttaaaactaattgcagacggactgttaattccacaatctaaaattataattgaaacaccatcatacattaattccatacgtacttggcataatatcagagcgaaaattattcctttgtccatcaattacatcaaacagaatattaacaatatctttaaattaaatagtgattataggcacagtattttttactgtatacctacgctgcataaccctactcaaaatacttatagtaaagaagagaagcaaaaaattatagatcaatgtcataaagaaggtattccaattgtggaagatagtatatactctgatttatggttcagccctaaccaacaaatttctatgaaagctttaaaaaatagtgataatgttttatatttaggtagtttatctaaaactgtaagtcccggtttacgtattggttggattatagcagatgaaaaagtaattcatcatttagccgatttaaaaatgcaaaatgattatggtgcaagttctatatcacagtatattgccacaacgtggttaagtaattatcatgaagatcatttatataaattaaaaatcgaactaaaattacgaaaatctatttttataaagtcattaaagaaacatctatctaagtttggatattggaatgaaccccaaggctcattttatatctggtttaagctatctgttccagtaaatataaagctcttatttaacgaagcaataaaagaaaatatactaatacacccaggagaaatatatgacattaactctaaaagctatatccgcttttcatactcatatatcgacaaggaagaaattgaccaaagcttaaaaaaattaagtgaaattataaatagaatacgaacttagttaacatttatcaccctttatataattcattttatacatgcgtgttataatattaagcacaatacgcattacatttcataaaaaacctaaaatgcattttgttataagatattgggatattatacacatttacaaatattgacaatatgatctatatcatcaaatattatttcattgtatgaatatagaagttttattaaaagataataatgagtactattaaaaagggaattccccaaaaaatgttttgattggaaattcccttttttaatttttatgtggcgaattgttgcacttaatttgacaacctaaaacttaagaaaatattcagtcacacaacctatcttacttattacttatttaattccgtatacccatctcacaaatccatctataatacaaactatcattttatataagcagaatttaccctgtcttccacacaaactgttttcgtcactttaatatgtcttctattcaaaaaagtcactcataacaaattgcgcattttaataaatttagcaatgccatttgcatgctgcaaaaatactcatattaatatttatattttatattatttaagttttttaaatccatatttttataacacttgctatgtgataaaattaattttatatatataatcttaagattcagattatttaatagcaaaggagatagtgatatggatgttttaacaatagaacatttaacaaagaagataggtaataaaacgattctcgacgatgtatcatttaagctgaaacgcggacaaatagttggtcttgttggagcgaatggtgcaggtaaaacaactttaatgaaagttatattaggttactctagtttccaaagcgggaattttaatgttattaacagcaaggatagcaaaagcaatatcggtgcattgattgaaaatccaggaatatatccttttatgtctggatatgaaaacttgaagttattgaatgaatcaaaaaacactcaagatatcgataaaattgtctcacaacttcatatggatgaatacattcataaaaaagctaaaacgtattctcttggtatgaaacaaaaattaggaattgctatagcatttttaaatgaacctcaatttattatcttagatgaaccaatgaatggcttagatccaaaagctgtgcgagatgtacgtgaattgattgtccaaaaagcgcaagaaggtgtcactttcttaatttcgagtcatattttaagtgaattagttaaaatcacaaactctatccttattattaacaaaggtaaaattgttacagaaacatcggaagaagaacttaaacaatttaaagataatgatttagaaaatgtattactagacatcatagaaagggaggatcaagcataaaatgggaactttaattaaacaagaatgtttcaaattatttaaaaagaaatcaacttttatcgcacctattgtctttattctactaatggttgctcaaggttatattgctacaaaatacaatgaaatttttacaccacaggaatcttttacatctgcttataatggtttttcatggtttgcatttttattaattattcaagcaagtacaatcatttcaatggaatttcattacggtacgattaaaaatttactctatcgtgaatattcaagaacaactatgattgttagcaaaatcatcacattatttattatttctttaatttattttgttattacaattattgcttcaattgttattgggtctttattctttaatgatttaaatatatttgaaagtagcggtaatcaattatctttattgaatcaattattattagttagtttaggtacatttgttggtgtttggttagttttaagcttaacgttgctattatcatctgcaactaattcaacgggtgtagccattgctgtaggtattgttttttattttgcaagttctattttagcagttattcaaacggcacttttagaaaaaatagactggctaaagtggaatcctattaatatgatgaatattatgcttcaaacagttgaaaaaggctttagtaagtcgacgaaattagaacttcatgaattgtttattggtaatattgcttatatttctattttcttaatacttgtagtatttattttcaagaagaaaaatatttagtaacttaaagtattagatgaataaatacacacatatttcatcgtaattcaaaattattttcaaatcccttcacccaaataatggtgcagggatttttgatatgtcagcatgccactcattctatctttaatatatttcaaaatccccccacttgtaatgtacaaaatatgctcacttaaacgataatcgtatctctgccaagctatttcaactctgctttaatataaaaattattctcccggatgggatgcttatatctctatcatgatatttcaacgccgcttcaacaactttatcacttcatatttatgcgggtacacttcaacgctactaatatgaatgatacaaccacagattctcaacactaaaattcacaatatgtttactctatttttatcaattcaagcatacttattgaaaaatgttaacgttttcttgataatcattgtaagcgtattaattttacaaaccaatgattgaaatatactacaggagtgacacacaatgactcaaattactgaaagagaattaaaaaagaaatatttggatttattatctcaacatttcgatactccagaaaagcttgcgactgaaattattaatttagaatctattttagaattgcctaaaggtacggagcatttcgtcagcgatttacatggtgaatatgaagctttccaacacgtattacgcaacggttctgggaacgtgcgagcgaaaattaatgatattttcaaagacaagttatcaacgaaagaacttaacgatttgactgcccttgtttactatccagaagacaaattgcaacttattaaatgtgattttcaaaattatggacaattaaatgtttggtatattacgacgattgaacacctcattcagctaattaaatattgttcttcaaaatatacgcgttcaaaacttcgacgtgccttgccggagcaatacgttttcatcgtagaagagttattatataagaacaacgaatttaaaaataaaaaatcttactacgaaacacttgtaaaccaagtgattgagcttaagcaagcggatgatttaattatagggcttgcgtattctgtacaacgcttagtcgtcgatcatttacacgttgtcggcgatatttatgatcgtggcccgcaaccagataaaatcatggacacgctgattaattatcattctctggatattcaatggggtaatcatgatgtgctgtgggttggtgcgtatgcagggtctaaagtatgtttagctaatttactacgtatttgtgcacgttatgacaatctagatatcgttgaagatgcatacggtattaatttaagacctttgctaacattagccgaaaaatactatgatgcagataatcctgcttttaaacctaaaaaaaggcctgacaaacatgaacgtttaactcaacgcgaagaaagtcagattactaaaattcatcaagcaattgcgatgattcaattcaaactggaaataccggttattaagcgacgtccaaactttgaaatggacgaacgacttgtacttgaaaaagttaattatgatactaatgaaataacagtatacggaaaaacatatccattaaaagatacatgcttccaaactgttaaccgtgataacccagcaaagttactacctgaagaagaagaagtcatgaacaaactattattgtcattccagcaatctgaaaaattacgtcgtcatatgtctttcttgatgcgtaaaggctcactttacttaccttgtaatggcaatttactcattcatggttgtattccagttgatgaaaatggtgagatggaatcattcgaaattgatggtcagacatacagtggccaagagttattagatgtgtttgaatatcatgtccgtaaatcatttgatgaaaaagaaaatactgatgacttatccactgatttagtttggtatttatggactgggaaatactcttcactatttggtaaacgtgcgatgactacgtttgaacgatactttattgcagataaagcttctcataaagaagaaaagaatccgtactatcatcttcgtgaagatgtgaatatggttcgtaaaatgctcagtgatttcggattaaatccagatgaaggacgcattattaatggtcacacaccagtgaaagaaattaatggcgaagatcctatcaaagctgatggaaagatgcttgtcattgatggcggcttttcaaaagcttatcagtcaacaactggcattgcaggctatacattgttgtataattcattcggaatgcaactcgttgcacatcaacaatttaacgcaaaagaaaaaattctttccgaaggtatcgacgaactgtcaattaaacggattgttgataaagaattacaacgtaaaaaaatccgcaatacaaataaaggtaaagagcttcaggctcaaatagatattttgaaaatgttaatgcatgatcgttacttagactaaagacgacttttgatgcacgtgtcgtacacttatttagaggtgctgtgtttacgcattggctacgcaaacgcgatggtaaataggcgacctagctacaccgaaaaaatcccctcactattacgagtagtgaggggattggtgtatctatgctagttccttgttaactgtattattacaacattacagtaaaaaaatgcaaaattaactaataaattaataaaatgatcgacgcccttgcttctactccaatttaacaaaatactatattagtactatatttttcattcacatgtatgttacattttctatattacttaaaattacgaagggacatttttaaatcatgcgcatcttaaaagagtccattattgtggcatttgcctttgttggtgttgtcgttggtgccggctttgctactggtcaagaaattttccagtttttcacaagtcatggcgcgtatagcatttcaggcattattgtgacaggactattgattactttaggtggaatgattgtcatgcatacaggtcatcatctaaagtctagaaatcattctgattcaattaactatttcttatatccctctattgcaagaggttttgatattattttgacaatgtttatgttgtctttagctattattatgactgcaggtggcgcgtcaaccattcatcaaagtttcaacttaccgtattggctgagcgcactcatattagtcgtgtttattttagcaacactgtttctaaaattcgatcgtttaattgctgtgcttggcggtgttacaccatttttaattgcgattgtcattatgattgcggtctactatttcacaacgagtcattttgattttactgccgctaataatgatgctcagattcataagcagaaatcattatcacctggatggtggtttgatgcgattaactatgcaagcttgcaaattgctgctgccttcagcttcttatcagtgatgggtagtaaagttaagtatcgtgactcaacgttatacgggggcttgattggcggtttaattattacatttttactcatgatgattaacctaggtttaatttctcaattcgataaaattaaacacgtcgatttacctacattaaaattagcgacacaaatgtctccgtcaatcggtattattatgtctgtcattatgatacttgtcatctacaatactgttgttggattaatgtatgcatttgcgtcacgtttcagcgttccatttagcagacgttacttcatcattattattacaatggctgtcatcacttatattagtacatttatcggtttcatttcattaattggaaaagtattccctattatgggattgttcggtttcatcttactcatacctgtactctataaaggtttaattaagcgtattaccggcaaatctcatatcgattaaaatatctatactattgtaaaatttagtacaacacttcaaaatcaaaaaagcggacagatgaaaagtaaaaatcttttccatctgtccgcttcttaatagaactgttatttctcaagtatttgttgaccagccgttaatccagtttctgtaatttcatgaccattcacccaaacttcttcgacttgtgccccacgtgtcttaaacaagttaatgacttgttcacttgcagctaatggcactattggatcatgtttccccatagaaagcaacacactgacatctgataacttctttgttgaccttacttcaattggatataacggtgcatataacaatgcttttttaaatggtgcttctgaacgcaacattaagttaatcgctatatttgatccatttgaaaatccaacaagtacagccttttcaatatcaaaatcataacgttcagcagcttctttaataaacgttaacaattcttgtccccgaaatgccaaatcttcttcatcataaacaccttcaccaagacgtttgaaataacggttcatcccattttctgaaacttgtcctctaatacttaacaagtgataattttcattcaatgcttcgcctaatggtaataaatcgaactcatcaccacctgtaccatgcaataatattagcgtcggcgcaccattttgtccttctctaaaaatatgttccatcacaaatccctctcattccaattaatcatgttgacgcttcgtattaaaaggtctaacttccgattctatatattctcttttattttctaaaaatggtggtaaggataacccttctcctaatgtttcataaggttcatcttccataaaccctggtccatctgttgaaatttctattaaaatatgccccacacgtgcatataatgcttcaaaataaaaacgattaacgatgcctgagttgttaatacctacctctttatatttcgttgcccacgcttctattgcatcatgatctttcacacgaaatgacacatgatgtacctcaccataaccttgacgtgctgctggccctttatcatcttttattaagattacctggccaccattgcctccttcgccaacttcaagtaatgcgatattatcttcatgcgcaatagttgtcataccgtaaacagtctctaaaatatttttaaagtcgtcaaaataacttactttaatttcaatggggcctaatccataaatcgctttgtctactggaaccggtccattcttccaaggtacaccaggtgccaccccttcatttaactcatctgaaattaattgatacacttggccatcgacttcttcaaatggcaacacttttttaccaaataattcttgaataccttcatgtttaacaccaaattcatcaaagcgctgttcataatacattaacgcgtcatcgttaggcactctaaaagacggtcttgtaatggaatttgttcctgcctgcccttttgtaatatttggaaaatcaaagaacgtcatgtctgtacctgccgaaccaacgtcatctgcaaaaaatgtatgatacgtataaatatcatcttgattgactgtctttttaactaaacgcattcctaatacttctgtaaaaaatttataattacgttctgcatcatctgtcattgctgtgacatggtgaatacctagtaattcatgattatttgtcattttatataccctctttatatttttagtgtatttatctcgaaaccgagatattttaatgtaaaattttagtgcacgccttacacttctgtagattgtgcacttagtttcttaaacgcttgttgtaagattgttaattcatcctttgttaacacatcaaacgcttttgttaatgtctcagcatgcttagggaaaatatctgccatttggctttgacctttttcagttaaacaagccatatatacacgtttatcatctttatccttttcacgtgtaatccaacctttgtcctctaattgacttacaacatatgaaatgctgctacttgcgattaatacgcggtctctaatacgttgaattggttgcggacctttattataaagcaactcgagcactgcaaattcagtaatatttaagccgtatcgctttacgtcttcttttgtaatttgctctaatgtgtctaacgccctattcattccgacaaagacattgagcgattgtttcgttcgatccatatcatcaccaactttttaatttatttcgatttcgagataaattatatagctgaatgaatttaatgtcaagatacgtgttttcatctttatttcaaattgcacttaataaaaacgactacatagatgtggcaatgtcgtcacatgactgtcatgcacctttgacttcgtttaagttaaaatagaatagggaaatactataatcaatcatgataggagttgatatgtatgagtaaccttgaaattaaacaaggcgagaacaaattctatattggtgatgatgaaaatcatgctttagctgaaatcacataccgttttgtggataataatgaaattaacattgatcatacaggcgtatctgatgaactcggtggtcaaggtgttggcaaaaaactagttaaagcagttgttgaacatgctcgcgaaaatcatttaaaaatcattgcctcatgttcatttgccaaacatatgttagaaaaagaagattcatatcaagatgtgtatcttggttaaataaacctcgcgatggtgcgccagtgccatcgcttttttatttgttcgtatcaatataaaattgcgaaacatcatgttattttgcatttcaaactttttgctgtcaattcattttcttttctggtatactttttatactaacttatagaaaaatagaaaacgaggcgattcataatggcatttcacgataaaacagcaacacaagtgacaaacattgaactgaacgtaagagacttagacttaatgacaacattttacaaaaacattttaggactatccgttaaaagttctgacgataacacaaccgtattatctgttgggactggtggccatactctaacgttacatttattagaagacggccgtcagacttccccacgagaagcaggactttttcatatagcatttttattaccaactactgaggatctagctaacttcttatatttcgtggcacaaaaaaatatgggcatcggcgctggtgatcatttagtaagtgaagctttatatttcaacgaccccgaaggtaatggtattgaagtctatcgcgatagaccttcatcttcatgggaatggcaaaatggcaaagttaaaatggatactttagaagttgatagccaaaccttattaacacatcgtactgatgaaggttggcaaggaatgccagcaaaaggcatgattggacacttacatttaaaaacacatgacttagacgcagcatatcaatgttacattgaacaattaggattccaacatgtgtctgattttccacgtgcgctatttatgtcaacgaatcattatcaccatcatattgctgctaatacttggcaatccaatcaagcaagacaaaacaatgcacaaagttatggattaacacatgttgatatttatcaacccgacgcctcaacacatacatttacggcaccagaagggtttgacatcacagttcattcaaatactgaccttgttccagaaaaataatcatccatactttattaatacaattttttcacgcaaaagcctgcgattcatttatgtaatcgcaggctttttttattgctaactttttaattttatatatttagacatactgtattctatttattcttttggtccaacccattcaataacatcttcatatgcttggcgtgttttatttttcggtggatcttgttgtctgtagccaaatgcaaccatcactgataaaccaaattgctcagtatctaagatacctttatttgctaaaatgtctgtcactgtatccagactaaaaccttccatcggacatgaatcaatacctaacaatgcggctgtcgtcatcatattgcctaatgcgatatacgtttgtttacttgaccagtcatacaaggcttgatcattatcagaaatatggaaatctgcttggaatgcatcgaatttttgttcaacagctggaatcgtttgtgcctcatattttttaatatctcttaacatatgttgtacatacggtgatcttgacgttacatttttacgcgcaaaaattagcacaaaatggctcgctgtatctaattgtttcgctgcgccccaactgtgcgcttttaattcatcacgtaacgcttgatcttgaatcacgacaaacttccaaggttctaacccaagagaacttggagacaatctacctgactctaatattgtttcaaaatcttctttcgaaactttcttttgtggatcgaattgcttagtagcatgtctgaaatgaaatgcatccataattgtttgattcatattgctcattgaacatagcctccaatttttatatttattgctatacaaattatacttcatgttttaaaaagactaaagtaatccgtttgcaattcactataacttgtgcacatgttataagttttctgcaataaaacacacttttgaattttgggaaatttagtgttataatatatttgtgatatttttcacaattaaattgtggcgtgattttaatgtgcataatctttaatttcactcatttacttttcaatcttttaaaagcgaggtttttaataatgacaaaaattatgttctttggtacgcgtgattatgagaaagagatggcattaaattgggggaaaaagaataatgtcgaagtaactacttctaaagagctattatcaagtgctacagtcgatcaattaaaagattacgatggcgtaactacaatgcaatttggtaagttagaaaatgacgtttatcctaaattagaatcttacggtattaaacaaattgcacaacgtactgctggatttgatatgtatgatttagatttagctaaaaaacacaacattgtgatatctaacgttcctagttattcacctgaaacaattgcagagtattctgtttctatcgccctacaattagtgcgtcgcttcccagatattgaacgccgtgtacaagcacatgattttacttggcaagcagaaatcatgtctaaaccagttaaaaatatgactgttgcaattatcggtacgggtcgtatcggtgctgctacagctaaaatatatgcaggatttggtgctacaattacagcttatgacgcttatcctaataaagatttagactttttaacttataaagatagtgttaaagaagctattaaagatgccgatattatttctttacatgttccagcgaacaaagaaagctatcatttattcgataaaacaatgtttgatcatgtgaaaaaaggtgcaatcttagttaacgcagcacgtggtgcagtcatcaatacacctgatttaatcgatgcagtgaacgatggtactttgttaggtgctgcgattgatacttatgaaaatgaagcagcatacttcacaaatgactggactaacaaagacattgacgataaaacattattagagttaatcgaacatgaaagaattttagtaacaccacatattgctttcttctctgatgaagcagtacaaaaccttgttgaaggtggtttaaacgcagcattatctgtcattaacactggtacatgtgaaacacgtttaaattaatatatatttaaacaggctgggacataaatccctaaaaaacagcagtaagataattttcaattagaagatatcttactgctgttctatatttatacaatacttcgtattgaatggcttcgctatgcccatctggcacattactgtaaaattctataaatagaatttttgatgatgggtcccttcctagggtgccgtctcagcctcggtcttcgactggcactgctccctcaggagtctcgccattaatactacgtattaacatgtaattttacttttaaataatttaaaaaataagacactttgccaaacttgcacataaatgtataattcaataatttgaattttctgtgttgggtcccttcgtataatttaataaataccactaaactaaattaatgaagtgccttatgtataaaaattataacttgatccaacttacactaccaatagaaacttctgttagaattcctcaaattgatatttcgcgatatgttaatgaaattgttgaaacgatacctaatagtgaattcgatgaattcagacaccatcgtggcgcaacatcttatcatccaaaaataatgtaaaaattatcttatatgcatacactcaatctgtattttctggtcgtagaatagagaaactacttcatgacagtattcgaatgatgtggttagctcaaaatcaaacaccttcttataaaactattaatcgttttagagtaaatcctaatactgatgcattaattgaatctttatttatccagtttcatagtcaatgtttaaagcaaaaccttattgatgataattcgatttttattgatgtacaaaagtagaagctaatgccaataggtatacatttgcgtggaagaaaagtattcaaaatcatgaattgttttattttgtatatctgtatcaaaatcgatttgattaaaatccgctttattttatcatctattcaaatgattttagtgcgcttattttactatggcattattgcctaacctgtttgagatatattaatatttgatgattcgtattcaaagttttcatttaacatgtatttagtatcatgatagctgcttcattgataatctacttcctactttttcaacacttcttgttcgataatcgttaaaacaccctgcttatcattacttggagcgacagcagaggcaatattgaacaattcttcatcatgactgttttccatcacataactatgcttagcgaatgctagcatatctttatcattattcgcatctccgaaggccatgagctctgaagaagacattccccatttatctaacaatcgttttaatgcctgccccttagtcatgtttggcataataatatcaatgctatcgtgcccacttgagacaagtttaatatcattgctgaattgcgttgctacttcttcgtcaacattcggatgcgtctcacgattaatattaaatgctattttgacataatcatcctcaggtaattgttgtagactgtcaatttcttttaactgatgataataaaatctcgtatcttctttaaatgcttcagaagtatgttttaaaatatacgcgcttttcaaaccacagatgacgagttgatcaatactttggttcatatttaagtaatcgacaacctgttgaaacacctgacgattaaagcttttataattatataactcattgcctttataaataactgcaccattttcagaaataaaatacatatctctatccccgaaaatagacttcaacttcgcatattgattaccactcgcagcaataaatgtaatatctctatttctaagttcagtaaaattcgcttcaaatctaagtttatcgtatgtcttttttgaatctaaaaacgtcccgtccatatctaccgcaatagccttaaccatgattatcctcctcattgctcttttagtcgtcttcattatatccatctcatgacaagcaatgaagtttgtcataccacaatgaacctatattcacattttgaaattgctttcatatatgcaaaacacattacactggatattaaattactttttacctcacaccaaacaaaaaaacagtctctcaatcaagactgttttctacttaatattcatccattatcacaatggattatttgacttctgtagctacaaagattttacgtttttcccaaacgcctgtcttttcattgtaatcatcacaagtaattaatgttaattgtttatctttacctttttgttcatctagaacttctacatctgtaggcttaacatctcttatacttgtcattttatacttacgtgtttcattaccaactttaaagtaaaccatactaccttttttggctgctttaagatttgtaaattgatagttcggacggtcaatgaaagtgtgtcctgcaattgaaatattttgatcatctagtgattcattttcttctgcaaagcttacacctctatttaattgttcaggtgttgctggtcctggatatactggttctttaatatcagcatctggaatttcaatatagcctgccacttttgatttatctttcggaatctgaggtttagcttgctgcttattgtctttactcgcctgttcttttacatttttatcatattgttcaatcttttcatctttatctttatcgtgaagataattatcgatatgtggtttagcaaacaaatatgctgccactaggataagtactacaccagcgattgtcattaatcgatttgtccattttttcatacgttaaggctccttttatacatttcacaatgcctattaacatttcatatagtataccattaattataaaatgactcatagcaattcattttataatattaaatttgcacatatattgtcacgttagatttcattacacatatttgcattcaaataacgaaacgcttttaataattactaagggggaattgttatgattagatgcgctaaaaaagaggatttaaacgctatattagcgatatacaatgatgccattatcaatactacagctgtttatacttatgaaccacaaaccatagacgaacgtgtcgcatggtttgaaacgaaacaacgtaagcatgagcctatctttgtatttgaggaaaatggaagtgtcttagggtttgcgacgttcggttcgtttagaccttggccagcatacctatatacaatcgaacattctatttatgtcgatgcttcagctagaggaaaaggtattgctagtcaattgctacaccatttaattgtggaagcaaaagctaaaggttatcgtgcactagttgcaggcattgatgcttccaacaaagcgagtattcagttgcatcaaaagtttgcttttaagcatgccggcacactgaccaatgtaggttttaaatttaatcaatggttagatttagcattttacgaattagatttacaagactagtaatatttgaatcacataatataaacaagacaaccatgttaattcacttaacataacaagccaacatataaaattttaaacttctcagggaagtgggacagaaatgataaagagccactaatgatttattatgtagtggttcttacacattagccacagctaatgtgtacttaaaaataggaatacatgagtaaaactcatgcataagagtctgggacataaatccctaaaaaaacagcagtaagatattttctaattgaaaattatcttactgctgttctctatttatacaatacttcgtattgaatggcttcgctttcctagggtgccgtctcagccttggtcttcgactggcactgctccctcaggagtctcgccattaatactacgtattaacatgtaattttactttgaaatactttaaaaaaataagacactttcgtataatttaataaataccactaaactaaattaacgaggtgccttatgtataaaaattataacatgacccaacttacactaccaatagaaacttctgttagaattcctcaaaatgatatttcacgatatgttaatgaaattgttgaaacgatacctgatagcgaattcgatgaattcagacatcatcgtggcgcaacatcctatcatccaaaaatgatgttaaaaattatcttatatgcatacactcaatctgtattttctggtcgtagaatagagaaattacttcatgacagtattcgaatgatgtggttagctcaaaatcaaacaccttcttataaaactattaatcgttttagagtaaatcctaatactgatgcattaattgaatctttatttattcagtttcatagtcaatgtttaaagcaaaatcttattgatgataattcaatttttattgatggtacaaaagtagaagctaatgccaataggtatacatttgtgtggaagaaaagtattcaaaatcacgaatcgaaattgaacgaaaattcaaaagcattatatcgtgacttagttgaagaaaaaataataccagagataaaagaagatggagatagcgatttaacaatagaagaaatagatttaattggtagtcatttagataaagaaatcgaagatttaaatcattctattcagaacgaagattgtactcaaattagaaaacagacccgtaaaaaaagaactgagattaagaagttcaaaaagaaatttgatgattattccgaaagaaaaagtaaatatgaagaacaaaaatcgattcttaaagatagaaatagcttttctaaaactgatcatgatgcaacttttatgagaatgaaggaagaccatatgaaaaatggccaacttaagccaggatacaatttacaaatagcgacaaattctcaatttgttttatcctatgacctatttcaaaacccgacagatactagaactttaattccatttttaacaatgattcaaaataccttcggttatttaccggagtatattgtagctgatgcaggttatggtagtgagcaaaactatatggctattatagatgattttaataaaacgccacttattacgtatggtatgtttattaaagataaaacgagaaagtttaaaagtgacatttttaacactcaaaactggaaatatgacgaacttaatgatgaatttatatgtcctaataacaaaagaataggttttaaaagatatgcataccgtaatgatagatatggttttaaacgtgacttcaaactatatgaatgcgatgactgttcagcatgttctttgaggcaacaatgcatgaagccaaattcgaaatccaataagaaaatcatgaagaattataattgggaatactttaaagcccaaattaatcaaaagctttctgaaccagaaacgaaaaaaatctatagtcaaagaaaaattgatgtagagcctgtttttggatttatgaaggctattttgggtttcactcgaatgtcagttcgaggaataaataaagttaaacgagagctaggttttgtattaatggcacttaatataaggaaaatagtagctcgacgagctgtatattatcaaatacatttaaaaaaagctgatttctatcaaataattaatagaaatcagcttttttacattgcctaagaacttaatgtcccaagctctttatcgtcgttccaccccaactcgcattgcctgtagaatttcatttcgaaattctctgtgctggggcccctgactagaatcgaaaaaagcttgttacaagcgcattttcgttcagtcaactactgccaatataactttgtagagcatattacattgatttacatcgtcccttttatttattcttttcaaatactatccccatagctttgatttaacgctttttctcaataacaaaacgaatatagtagaacatgaaaacgataatcatgctgagcgataaagatttaaataatagattgacccacgttccctcagtcgtatatccatatgtaatcgttgtgttaatgatgaatgctataaagatgattgatagtcttagcatatcatcactccttttaagttattttagatatacgggggcgcttttgcaatcactattttgattagcatgcatttcccataaatttttcaactttatgaaagataattaagaagcatctatctggtactaatgatccagacagatgcttcttttttatcaatattttattgttatctcattaattatttttaaccatatcttcagctgtgccaaagattttacgtttaattgcttcgccagttggtgtgcctgctagtccacccaatccagtttcacgtaatgatgcaggaaggttacgaccaaccttatccattgcttcaataacttcatcaacagggattctactttcaatacctgctaatgctaaatctgctgaaattaaagcgttacccgaaccaattgcatttctcataacacaaggaatttcaacaagtccggctactgggtcacaaactaaacctaataaattacttatcgctaatgccatagcgtgcccggatgcttctggtgatcctccgaatatagctactgctgcagctgccgccattgcagatgctgaaccaacttcagcttggcagccacctgttgcaccagctacacttgcattgtttgctacgacacgcccaaacaatgctgaagtgaataagaagtcaatcatttgctcttctgttaaatcatgtgttttttctaatttaaaaagtgcaccgggaatggtacccgaggaaccagctgttggcgttgcacaaataatacccatcgcagcattgacttcatttgttgcaatggcacctttgactgcatcaatcatttcatatccagacaaagcatgatgtgtttcattataatcacgtagtttagcagcgtcatgaccagtgtagcccgttacactttcaacgccatcacctgtcgtcccttttattactgcgtctcgcatgacatctaaattttgtttcatttgcgctcgcacttcatcacgtgatttaccgcttaattccatttcttctttaaccatgatatccgcaaatgacatattattttctacggcataatctatagtctctctaattgaatcaaacatgtttattccccctctaatttatataggaaacgtttacgtcactgtatttctctttaattgtatttaatgtcgattctgagattgctttatttaatggtattacaaccaagcatttatcttcatctatcataataaattcatctttacagtctaatttcatatcgttgatatcattaatgaaatgatttacttgtgctttagtcatatttccgtcaacaactaaaattggtaatccatgatttaaatctacttctagtccatttatatgaatacctttaattttaattgtaccaccaccgattgaaataccgataatttcaatgtagcgaccatcattacgaaatgatttaatataagcacagtttggatgttgaccaatactatcgccttcttcttcgacgatatctattttaataccatcatcagctgcaatttctaatgaagatttaattcggttatcaaatgttgaatatcccattgctccacccacaatagcgacatctgtaccatgtccttggtgtgtttgagcaaatgattcataataatgtatttcaatatttttaggaatatctcccaatattgcgcgtgctgaattcccaatctttactgcaccagccgtatgagaacttgaaggtcccatcataactggtccgataatatcgaaagcactttgataatcatagctctttgccataattaaacactctccttaatatgattctttttgctcggcattttaaagttgatattcattaaattaaacttattaattagtgttccaataatataggctaagacaatgctgacaataatcactgttgcgattgttacaattgatgtcactgcattattaaagccaaataatacgatggcacctgcaattggtgttgccatacctttgacacctattactagtccgctaaatgtcacgatacatgcgttgacgaccccaatcagtgcatttgtaccatatagttgtactggatattgcgctattaaatcaatttgcgtcaatggctcaatacaaactgcaaatgcttttgacggtccaccaatgtttaattttcggaataaaataaggttaacaaatgagctacctgtacatgttagtgctccaatagccataggaacacctgtcagtcctaataaacttgttaataccattgaacttagcggtgtcatacctgtaacaggaatcactagtcctaaaatgaccgctaatgcatatggattgttatcacctaccgcagtgacagcactacctatttgttttaatgttgctagcacaccaggtgtaatgattgatgcaagtccgaaagcaattgctggtgcaaataagatcaccacaattaagtccaagccttctggaactttcttttcaatccatttaattaaaaaagctacgccataagctgcgatgaatgctggtaataatttaaagtcatgtaatactaaaccaacaatgaccgcaaatactggtgcaacgcctaagtttaagcacgttagaatacctactgcgataccgcttaaacttcctgctaaatccccaatatcttgtagaaatttaatatcaaatacgccaccaatagcgtaacttaagaatgcttgtggtagaaatgtcgcacaagctgcaccggataatgcttgtagtccttgtttaccgtacggtgcatactttaaaaatagcgtcatgatcactaaaaccaagactaatgtgcctacacctaacagaatatccatttcccaaaaacctctctctatgtttattttattttcagaccataaacatcgtacacccttaagaaaacgttttcaacttttatctgttatcaaatcaaatatttaagtgaaatatttcatatttgtgaaagatttttaaaatggattgtttcaaaaactgcttatgttgtcattaatatttactaattaactttttactctatatttcaaacagttgtgtgacagttttttgataacttttttacatctgaaagtaagtaatatttctaaaaacttttaatatttatacattttatctttcgagctatttatttcttatttttgtgctgtgtttataaaaccgcacactatattcaaaaataacttattacacatatatttgcaataagataattaaagtaggatattatttttagttttctgataggaatgatgatagtctataggttgaatctttactttttttaaagctaaatttacatcaacttaacaatggttggttatactgaagatgaaaatatttagtataacttagtggaggcgataaaggtgcaattgagtcattccgttaaagttgcaatttctatctatttagcacttatctttataacgttcacttcttatttagtcattattttatatacgagtatgactggacatgatgtatcacatttcgttttagatagtcagcattctcatcatggatctcttacgcaaaaacatttgagtcttcctgaaatctcatttaaatagtttatcctctgtgtttcaacattcatttcccatatcgattcatttatctatcatccagaccactacatcttagatgatttttttttattttctcatttcactctttcttaaaagtcgatataatgaattaaatcattatcatacactgacatattttatgttgttggtgttaagttttaaaggggtgagatacttggtgaataatcattcagctttgcgtttaaaaggaattatacttgccattgtcggtgcttgtttatggggattaggtggtactgtttctgatttcttgttcaaatataagaatattaatgtcgattggtacgtcactgctcgacttgtagtcagtggtgttttcttacttattatgtacaaaatgatgcaacccaaacgttctatatttagcgtattccaagatcgacgtatgttaggcaaattacttatcttcagtatactgggcatgttagttgtacaatatgcttatatggcatctattaatacaggtaatgctgcgattgcaacattactacaatacattgcgccagtctatattattatttggtttgtcataagaggcgttgcaaaactaacattatttgatgtgcttgctattatcatgacactattaggaacatttttattattaacgaatggttcattttctaatttagtcgtcaatcctgcaagtttattctggggtattttagctggtgtagcactcgctttttacacaatttatccttcagacctacttaaccgcttcggttcgattctaattgtcgggtgggcaatgcttatttctggtgttgcgatgaatttacgccatccaatttggcacattgatatcactaaatgggacatatcaattatattatttttaatctttggtattatcggtggtaccgcactcgcattttatttctttatcgacagtttacaatacatatcagcgaaagaaacaacattattcggaactgttgaacctgtcgtagccgttatcgcaagcagtctatggttacatgtggcattcaaaccatttcaaatcgtaggcatcattcttattatgattttaattttattactatcccttaaaagacaacctgaaacattagatgaataagaaaactctgataatcactttagcaagtaactatttttaacaacgtagttaccttataggtgatatcagagttttttattttagttaataatatttttcacttggtataaaaagcgtcgtcgctctggtatcggaaatactggataaatatggaattggtaatatccaggtataaagtcatgttcgataccttttgcactcaacaattgcgataagttcaaagcatctgggtacagtacttcttttgtgccaacagttaatgtaatacgacctaaaccatctaagtcaccattaattggcgatactttgtagttatctaaaggtgtgtcccctgcccattgttcagctaagaacacactgccattcacacctaccattgggtctttctttaagtagtcaggaatttcaggatgctgcatcgttgcatctaaaactggtgaaattaatacaatatgtcctggttgcacaatatgtttttcttttaacaattgagcaaatgatagagcaatttgaccgcccgcagagtcacccattacaacgatttgtttagaatctgctacttgattcaataaatcatggtacaacttttcaaaaagcacatacgtcgcttgataatcttgatgcggaatcttcggatatactggcatgatgactttagcattgagtgtttctgcaagttcatcaataaattcgaaatgaattttgagtgggtcttggaaccatgcgcctccatgtgcatataatacaacgcgttgatgcttatcttgtttatcgttaacggtataaacggttgaaccgtagtgcttatccacttttactggcatcttaaactgataatgggtgccctcatattcacctgctgtctgtggcgccattttttctaatgctttcatcgcttcttctttatacataaaacgacgcttagctctagataatcgtataccttgttctaacatataacttttcacactgcgtttttctttaattctaatatgtgcgtatgccgctactaaaaatccaaacgcaagtgtagaccattttttacgcatttgtcgtcactcctctttgatgatttctactatagtattaatgtaccatgctgattcttattactaccaatatttactgggaaataagttataatgtctacataatcttagcaatactaatcatttgcgatattcatgctcatcgacatcgttattcacactatcattcatttgcttaagatgatgttcaaaacgttgcatatcgataaaacgcccttgacgatgcatttcttttccattcataaaaattaaatccacaggtacagtgaaaatatttaattctccagcaatagcttccacctgactttgattaatcacagctaatggcacattggggtatgattgcatcaagtcttcaatttgtggtaaaacggcatgacacacgctacactgatcgcgcatgacatgtacaactgctaacggatattgatgaataaattcacggaatgcttcgacactatttaattgcttaaccatttcgaacaccttcttactttttatattttaaaatgaagtcattattttgttgctaaaatgtcttgaaatacttgtggcacagaggtaatcttcttatcgctcaatctgtaaaaaccgcctgtctgtgtaccaatacaatgcacgccatgtgcggacacaatttcaaactgaaacacccatttcatcttgcttgctttaactaagtaaatacggcctactggtttgtcatgtattgtgacaggtactttatattctgcttccgttttcataagtataggtgaaatgccttgattgatcattgttgagtaattcatgtgctgattaataaacgctgttctcaaatcttcgaaccatctaatataaacgatattactaacgacacccatcgcatcaatgtcgtaaccattcacttcgatttctttctctgcaactaatagaccttctgttgtcataatgacaaatctccttatcttacaaatagatttaaaatcatgttaatttatttttattactttcatgataaaaatacaagcaattgaactttattacggaaaatcaaacttttcaatgacgctattaatttggctagtcgcgaagatgcatttttctaaaatgtgacaaaaacataagcaatgttttctatacctaacactaatatttaacttattctcatcaacacacctgctatacatcattgcgcactaaaaagacagtagcttcattttaagctactgccttttgtaacgtattctctttcaactcgctacttcgcatacgcactatgaatgactaaaagttcattcatttgatatgctatttcattttcaatcattatttgactgtcataattagcttacctggatcagcatcttggacatcttcaatgacaagttctttattttcaagatttgtaataatcattggtgtaacgatgcttggtgcgtgcgctttcaagtatgctaaattcactttcattaatggttgaccttgtgttactttttcatcaacgttaatcagactttcgaatccttcaccattcagtttcactgtatcgataccaatatgaataagtacttcgacaccactttcagattctaatcctatcgcatgtttcgtagggaagattgttttcactgtaccatcaaacggtgctacaatttcacctttttcagggataaagccaacaccatcacccatcattttaccagcgaatacttgatcaggtacttctgataatggaatgatttgaccgacacctggtgcatagatgtctgttgttccaagtgcttctacgtgaactggttcatctgacatttcttcagtcactgtcgtttcacttggctttgtaatttcaccactcataatcttcgccatatcatgtttaatttgatctgattttggaccaaagatagcttgcatattgtttccaacttctaatacacctgatgcgcctaaagctttaatacctgctacatctacttttgatttatcaaccacttctacgcgcagacgtgtaatacatgcatctaaatgtttaatgttttcttttccacccattgcatctaagacatcaaatggtaattttgcgacactagagttacgaatttcagtttcttcatcttcacgacctggtgttttcaatttaaacttacgaattgcaaagtcgaataagaagtaatacacgatagcatatacaataccgactggaataactaataatgcgtgtgaacgatcccagtttaataaaccatataaaatataatctatgaaaccacctgagaatgtcataccaattttaacgcctaataaatgcattactaagaatgatgtaccagctaataatacgtgaattccataaagtactggtgctacaaataagaatgaaaattctaatggctcagtgataccagttaaaaatgcagttaatcctgctgataacattaaaccacccacgatttttttacgttctggtcgtgcatttttataaatagcaaatgccgccgctggtaaaccaaacatcatgaatggatatttaccagtagtaaatgcaccagcagtaaatggtacgccatctttcaattgtgccatccaaatacgttggtcaccacgaactaattcacctgcgtgatttgtataacttccgaattcaaaccagaacggtgaatagaaaatatgatgtaaaccaaatggaattaatgagcgttcaataataccgaatataaaagttgttaatgttaaatttttatttaataagaaattcgataaactatttaatccatcttgaattggtggccacgcaaaacttaaaaccacacctgttgcaattgctacgaccgatgtcacaatcggtacaaatcgtttacctgcaaagaatcctaaaaatggtggtagtgtaatattataaaatttgttgtaacaccatgcggctaaagcacccatgataataccaccaaacacacccgtttgtaatgttggaatacctaatactaaggcatgtgctggttctttcgctgcttgacttaattcttttgcccctttggcatatgagaaaatgtcatcaattgtaatatgcaacactttccccattgttgcattcataattaagtaacctactagcgctgctaatgctgcaacaccgtctcctcctgctaatccaagtgctgtaccaactgcaaataataatggcaagttatcaaatacaacttgtcctgctgcttccatgaccgacgaaatcattacaatgatatcgttttttaaccatggtgcaatttctactaattgttcgttgtgcattgcgttaccaaacgctaataaaataccagctgctggtaaaatcgcaacaggtaacattaatgctttaccgatacgttgcaattgtccaaacaatttcttaaacatataaacatcccctatctcaatttccgcttccatgtacaaaaaagcaggcatgaacaaacaagactattctcatagtacggttgtttgctcatgcctgcattaccagtaacacgcaagtgatatgtaattcatagctattatacatatttgtaaaagcgttttcaacaactttttcacaattttatcatcaattcagtacaatcatttgtgataaataaacaaaacggcaattcccattttgttgaaatagaaattaccgtttttatagttcaattcaattgtgataacctttcaatcagttataagaaacgttttgctgcaactgaaataggtggaatttgatctaaatctaaatgtttatcttcagtaatagatctaaatgcccatttaccataaccaagcgcttcttcatttacaattttacctggtaatggcgcagcattaggatcaacataaacatctacaattgttggtacatcttgtgctagtgcctcttctacaatagcatctacttcgctagcacttttaattgtataacctttaccacctgctgcttcagcaaatttggcatgatccatatcagagaaatcaaccgcatattctaattcaccagcagcttgttgttcatatttaataaacgctaattgcttattatttagaacaaacactgttaaaggtagatcatattgtacagctgttgcaaagtcctgcatcaccatttggaatgcaccgtcaccagcaattgcgatggcttgtctatttggatatgcaatttttgatgccatcgcacctggaagaccgcaacccattgtacctaaccaacttgaaatgatgaacttgttatttacaccaaggtttaagtatcgagttgaccaaactgttgctgtacctacatctgctgaaatcactgcatcatctttaataaatttattgattgatgccattaatcgttctggacgtaatggtttactattattatttttatcttgttccatccatttatcccaaaccgctttacgttctaacgttttgtttaagaatggtctttcagcaacatgtttaatattttcagttaactgatgcaacgcaattttactatctccaacaattcctacattaatattgaaacgatgtccgatatttttaggatttgtgtcaatttgaatggctttaatatttttcttaggtaagtaatccacatatggatagtttgtaccaaccataattaataaatccgcttcctgcattgtttgataagatgttttagtaccgattttacctaagttaccgatactatatggatgatcatccggcaagattgttttagctggtaatgaatgaatgacaggaattttagccatttcaataaattcacgtagctcatctttcgcatgtttcgcaccaacaccgattaacatgacaggctttttacttttattaattaatttaaccgcttttttgatgtctttatattttggtgatactactgttggtcttgatgtatctactggtttattcgttgtatctttaattttttcagttaataagtcattaggacaaataacaacagctacacctttttgttcatatgccgtacgaattgcttcgttaacgatttcaaacacattgtcacctttttcaatttggtgattataaacggctacatcttcacataatttttgtaaatttgtttcttggaatgctttcgttccaagtgctgtactattcgtttgtccagataatattaattgcggtacattatccattttggcatcgtacataccatttaataaatgaattaaaccagggccaccgatacttaatgccacaccgattttaccagttaattttgtataaccagcagctgctaaacttgctacttcttcatgacgtacatgataaaatttaaattgatctctcactgtacgtaaactatcgaccactgcgtcgattgaatcacctggaataccatataagtgatctatatcccatgcttgtaatgctttaactaatgcttcatttgcttttatttttgccattattactaatagcctccctttcttagtgtctttttctaattaatagaacagtatgattagaacaggtattaacaccgaactaataactgcagttaaaatcatcccaattgaactaaatgcaccagattcaatatccatctccagtgctttagctgtgccaaatgcatgtgacgcattcccatacgttaaacctttggcgatagaagattcaaatcttccaaatcgtaataacatcgaacctaaaatactaccgattaaacccgttgtgataataaaaagtacggtcatcgtatctgtgccaccaagttcatgtgacacttctataccaacagcggctgttatagatcggggcaataatgttacaatgacgtctttagaatagccaaatgctttaagtgttaagaacactaacatgaaatttagcatgacgccagttaatacacttgcaaaaatgatagagacattatctttaattttctctctatttttataaagtgggtacgctaaacatacgaccgttgcgtttaaaatatggttgatccaactgccacctttcatatacccgttataactaattccaaagataagtaagacaaaaataattcctaaagatgcaattaatgctggattcaaaaatggatttggatatttttgttgtaatcttttagcgaaataatataaaacgacagtcaataaaatcattaacaaggcttgcacgtaatcattcataagcatctatacctttacgttgcttatgtttaacagacattttttcagcaatataacctgaagataatgcaacgatacatgttcctatgataatgactgcgaaaaagagtatataatttagcgtaatttcggaagcaacatccataatacctacaactgacggtatgaagaaaaagaccatcgtctttaataaaaagtttgcaccgtcttctacccaagttagcggtacaatcttaaattgtaatagtaaataaaataaaaatagaccaacaatactgccggctaagggaagatgaaaaatcttttgaatttctgtgccaatataagtaatcacaatgatgattcctagttgtagtaataatttgattattaattggactttgtgcatggcgccatccctttctaaatatgtctaaattgttacaataactattataaagatggcgtacacaatataaaaatactctttttttatggtttgtattactattttctatggaaacgctctctaaatttcacttcattttcacaaaaaaaacactcattatttcaatgatccaagtaatgaggaatcacaaataatgagtgctttattaatatgttagcctaaacgatctttcaaaaattctatccatttcgttgtggcatgacttaattgtttatccttcttccaaacaacacctaattcccaatgtacatgcgcatcttcaatgcgtagtagcttcacatctccatttagttgctctgaaattgatgttggtaaaatactaatacctaattcattcgtaactaaatcttctataacatgccattgtgaaatttgcgctacagtattcggaacaaagccaacgtttttagcattttcaataattttatcattcaagtaaaagtctttattaaataaaatgaagtcttcacctgctaaatcttcgagtttaacagtttcatattttgcgagtcgatgctctctgctcacgataagtcgcaaatcttccttatctagggtagtataatcgaaaatatgatgatccactggcaaagtggtcacgcctatatctacttcatcattgataatttgctgctcaatcgtttttccgccattttctattaaattatatgtaacatttggatattgttgatggaatgcaccaagaatatttataagaatcttcatattcatgactgccgacatgcccatgtttatatgccctgtttccagtccattcaagcgttccatttcagatggtaaataatcgtatagtgcaacaatttctttacttttctcataaaaaatttgacctgcatcggtaagtattaaatgtcttttacttctatcaaataagggcgtacccatttcattttcaatatctttaattgctttactaattgtaggttgtgcaatatataatgatttggaagcattagtcatgcctccttgctttacgacttcaataaaatatttcatatgtttgatatccactaacatcatcctaactatttcaacacgtttatttcattatacacaacttcttaaacattcaataaatttagatttataaaattgctttataaaaagttttatgtaaaatacacattcttttatggtattatattaatggctcaagtttgttattcgaggtgaggtattgagcttttacgaatttatgcaaagttttcttggtgatgacacaccattaggtgaattggttgattggattaatcaagatagcaatttccctagagaagtgaagagccatagtgaaatattgtcatattttcgaacaaatccatgtcctgaaagcatctcagtacctgtaattaaacgggcactatcagttttcaaccaattcacaaatgtacaatgatacatgaatacatggagtcacatcatctcatgttagcgctctgattgcagggcgctgtttttaatgttatcgcttcatttatatgttgtgattgctattttctttcagttatagaaccacgtaccttttcttttaaatcattttatattttcccactaatatccgctgttaatcaatcctgacatccttgtatcactatgacacttaattgttagatacataaatttctacattttatgaaaaaatccatttttattacaatttaacactttatatgacagcttcattacagttacttttattgttgattgcttgcattgttttctaaaaaaattttgctatcataaataacgttgaataaagaaaaaattaacttgggagataaaaatgaaatataaaaagatactttttcgtttactaattgcttttgcagtccttttctcagcagatttcacttatcaatccgtcgaacaaacgcatcaatcgcatgccgcagttaattattatagtaaaaaccaatgtacatggtgggcatttaaacgtcgcgcacaagtcggtaaacctgtttctaatagatggggcaatgccaaaaattggtattacaatgcacgtaaatcaaaatatgcgactggtcgtacaccaagaaaatttgctgtcatgcaatcaactgcaggatattatggacatgtcgcagttgttgaacaagtatataaaaacggtagtattaaagtttcagaatacaacttttatcgcccattaaaatacaatacacgtgtactaagcaaaaaggcagcacgtaactttaactatatttactaatcaaaaaacttctatcacgaacgcttcaaattcctgtatgcgtgtgatagaagttttttattttttgttcatattaatttatttaagcgctacgatggactgacttaaacttttctttaaaatcgctattcgcatttgattattgttggcttcttaaatcttgtaaaatgcgttcagcaacttgtgtattcgcacgaggttcttgcttcaatgcttcagctacttgcgcaatttcatcaccttttgcacctacaacaatagctaaagatttatattgcaagctcatatggccttgctggataccttcagaaacgagcgcgcgacatgctgcaaagttttgtgctaaaccaacggcagcaactacatgacctaattcttgcgctgactctacatttagtagctctaatgatgctttagctattggtaatacttttgtaccaccgccaacgattgccaatgtcataggcacctctatggtaccaattaaacgttgacgttcttgatcgtatctccatgttgcaataccacgatattgaccatctttactcgcgtatgcatgcgcacttgcttctgcaccacgcgtatcatttcctgttgctaaaacaacggcatgtatgccattcataacacctttattatgtgttgcagcacgatgaatatcaacttgtgccaatacagaagcacgttccattcgtttggcaacctcttctccagttctctcgccccttgctaaatctttaacatcaatttcgccttgaactttaacaacggacgctgttgcatgattggataaaatactcattaaaatgtcgctttgcggaaattcattttttaaaaatgcagttatagcctctaaaatcgtattaagcatattagcgcccatagcatctttcgtatcaacaaatacttttaaagatagtaactgttgctcaggaaatgtatcaatagctatacgttggtaaccaccaccacgcgctttaatagaaggatatgcctcatccgcaatttgatgaatttgcttctctaaagctttaatgtctgctgataatttttcagtatcgtcaacgccatcaaagacgatttgacctatcataatacgttcagaagataccgttttaaatccaccagtctgattcactagctttgcaccataactagctgcagcgacaactgaaggctcttccaccatcataggtacaacatatgctttatcgtccacaatgatattcggtaataatccaacgggtaatgcaccttgcgcgatgacattttcaattaaactatttgctacttcctcatcaattaatggatgattcaataaaatgttgaattgctcttctgataaccattgcttatctaccaattgttgtaacttttgttgacgagataaatgtcggaaattcttatctaaactttgcatggacatactccttttacttcacataattttttaacatttcaatcactactatttttaccataaaataacgttattcgtcttaaaattcaattgaataattgtcgttttgactttaaaataaagcaaggtaaattaaaacgcttacaagaaacgtcaaatcatttttaaatttagtgtatttctttgtataagattagcatattctgatatgatacaagtgttgcttttataaatttgaaaggatgtaaaaccttatgacattaggtatcgacaaaataaacttttacgttccaaagtactatgtagacatggctaaattagcagaagcacgccaagtagacccaaacaaatttttaattggaataggtcaaactgaaatggctgttagtcctgtaaatcaagacatcgtttcaatgggcgctaacgctgctaaggacattataacagacgaagataaaaagaaaattggtatggtaattgtggcaactgaatcagcagttgatgctgctaaagcagccgctgttcaaattcacaacttattaggtattcaaccttttgcacgttgctttgaaatgaaagaagcttgttatgctgcaacaccagcaattcaattagctaaagattatttagcaactagaccgaatgaaaaagtattagttattgctacagatacagcacgttatggattgaattcaggcggcgagccaacacaaggtgctggcgcagttgcgatggttatttcacataatccaagcattttggcattaaatgaagatgctgttgcttacactgaagacgtttatgatttctggcgtccaactggacataaatatccattagttgatggtgcattatctaaagatgcttatatccgctcattccaacaaagctggaatgaatacgcaaaacgtcaaggtaagtcactagctgacttcgcatcactatgcttccatgttccatttacaaaaatgggtaaaaaggcattagagtcaatcattgataacgctgatgaaacaactcaagagcgtttacgttcaggatatgaagatgctgtagattataaccgttatgtcggtaatatttatactggatcattatatttaagcctaatatcattacttgaaaatcgtgatttacaagctggtgaaacaattggtttattcagttatggctcaggttcagttggtgaattttatagtgcgacattagttgaaggctacaaagatcatttagatcaggctgcgcacaaagcattattaaataaccgtactgaagtatctgttgatgcatatgaaacattcttcaaacgttttgatgacgtagactttgacgaacaacaagatgctgttcatgaagatcgtcatattttctacttatcaaatattgaaaataacgttcgcgaatatcacagaccagagtaatctgtgtatttgaaagacatttaaatataacctaaaaacagcagtaagacagcttctcattgaaatcgtcttactgctgttttttatttataatgcttcgtcttgaatgaattcataatgcctatttgacacattattaaagttttcctattgcctgaatcctttatacgttacggcttcgtgctatgttttggtacataaagctttgacatatcgatattctccaactctaacagcttaattttattattaatcgttccaccgaatcctgttaagctacccgttttaccgacaacgcgatgacatggcacgataatagataatggattacttccgactgcacctccaaccgcttgggctgacatttttggcttatcaagcagcttgcctacttttttggcaatagcaccatacgttgttaacgtcccataaggaatctgtcttaattcattccaaacacactgttgaaaatgactacctgttggctttaaaggtattgtgatttcaggattgtcacctttaaaatacgcgtctaaccactgtgtcgcctctttaaatatcgctaaagacgtattttcttccctagtaccatcatcttgttgattttcaaacaaaacagcggtcagacttaccccatcactcacaagttccaatcgtcctacaggagaatcatagtaactcttatataccataaacacacactcctttttcatcatcatactattcatttaactttatgaaaatgattaacactttatgctttatcaagatcaactattcacttccaaatcaaaattcacatagactaccaacacaatataccatttcttaattaactatgtatcaacacatacgtttcttaaccattgattaatatttacttttaaattcttacttacttcaaaaattacacaaaaagttcataaagtgcctacaatgcgccgtttttaaaactacaatggtggaaaaatagaattgccattgtttatagtttgcatatagtttcaatatattttcttttacttaatagtttaaaattttagaggtgatgtttatgaataacaattttttcaatagtgacttcgattctattttacgaagaatgatgcaagacatgcaaaactcaaatcagactagtaacaagaaatactatattaatggtaaagaagtttcaccggaagaattagcacaatttacgcaacaaggtggtaatcattctgccgaacaaagtgcgcaagcttttcaacaagcagcactaagacaacaaggtcaacaaagtggcaatggcaattatttagaacaaattggtcgtaacttaacgcaagaggctcgtgacggattattagatccagtcatcggtcgtgataaagaaatccaagaaactgcagaagtcttaagtagacgcactaaaaacaatcctatcctagtcggagaagctggagttggtaaaactgcgattgtcgaaggtttagcgcaagcaatcgttgaagggaacgtacctgcagcaatcaaagataaagaaattatatctatagatatttcatcgcttgaagctggaacgcaatatcgtggcgcctttgaagaaaacatccaaaagttagttgaaggcgttaagtcatcacaaaatgctgtgctcttctttgacgaaattcaccaaatcatcggttccggtgccacaggaagtgattcaggtagcaaagggttatctgatattttaaaaccagcattaagtcgtggtgaaatttcaattataggtgcaacgactcaagatgaatatcgcaataatatcatgaaagacgctgcattaacacgtcgttttaacgaggtactggttaacgaaccaagcgcaaaagatacggttgaaattttaaaaggaattcgcgaaaaatttgaaacacaccatcaagtcaaattacctgatgacgtattaaaggcatgtgtagacttatccattcaatatattccacaacgcctattacctgacaaagcaatcgatgtattagatattacagctgcacatttatctgcacaaagtcctgctattgataaagtcacgactgaaaaacgtatttctgaattggaacatgataagcgtaaagctgtaagtgctgaagaatataaaaaagcagatgacattcaaaaagaaattaaatctctacaagataaattagaaaacagtaatggtgaacatactgcagtagcaacggtgcatgatatttctgataccattcaacgattaactggtattcctgtatctcaaatggatgccaatgacattgaacgtttaaaaaatatttctagtcgtttaagaagtaaaatcatcggtcaagataaagctgtagaaatggtttctcgtgccattcgtcgtaatcgagctggttttgatgatggtaatcgtccaattggtagcttcctatttgtcggtcctactggtgtgggtaaaacagagcttgccaaacagttagccattgatttatttggtaataaagaggcactgattcgacttgatatgagtgaatatagtgatactactgctgtttctaaaatgattggtacaactgctggttatgtcggttatgacgataattcaaatacattaactgaaaaagtacgacgcaatccatattcagtcattctatttgatgaaattgaaaaggctaatccacaaatattaacattattacttcaagtgatggatgatggtaatttgactgatggtcaaggtaatgtcatcaactttaaaaatacaattattatttgtacatcaaatgctggctttggcaatggcaatgacactgaagaaaaagatattatgcatgaaatgaaaaaattcttccgccctgaattccttaaccgcttcaacggcatcgttgaattcttacatttagataaagatgcattacaagatatcgtcaacttgttattagacgatgtacaagttacattagataaaaaaggtattacgatggacgtttcacaagatgcgaaagattggttaattgaagaaggttatgatgaagaattaggcgcacgcccattaagacgtattgttgaacaacaagtgcgtgacaaaataacagattattatttagatcatacagacgttaaacatgtggatatagatgttgaggataacgaattagtcgtaaaaggtaaataacgacaatttaacatatagcgtatcaaaaaatgagcatcaggacgccctcgcctgtgctcattttttaaattatttcccaggaaaatgattcgctgtgtgttgttctgttccacaacaatcacgatcaatgtcacatgtaccacattttccttgtttcgaacgtttgaaaaatttcactagtgtatacaaggcatatccgaaaattgctaaaaaaattaaaatgttaataatgactgacactttaaccactccttaaacaaataaatgtccgacttgataaaaaatgaatgttaagacatatgcagtgactagaggataggcaactgcaagtgccgtccatttccatgaataagtctctttacggattgctgccactgtagaaacacaaggaatatacaatagtataaatatcataaatgcatacgcagatagcggtgtgaattgattttgaatcacattaacaaggcctgcatcacctgatgaatagataatcgccatcgaacttacgataacttcttttgctaaaaatcctggcactaacgtagcacctgcttgccatgttccaaatccgagcggttgcactaacataccaaagaagctaccaaccatatgcaaaaaactttgattgatattcacattgataccatgtggtcctacataacttaatagccaaatgactactgagccgccaaaaataaatgtacctgctttacgaacaaagcccttagccttttcccaagtactacgccacaacgttttaatggaagggacacggtatgttggcaactccacaataaagattgcattatcattttttaaaactgtcttagtaagtactgtactgactaaaaatgccataataatacctaaaacatacaagcttaatactactaaagattgattttctttgaaaaagatacctacgaacaatgcatacactggcagtctagcagagcatgacatgaatggtgcaattaatatcgttgttaaacgctctttttcattttcaatactgcgcgcagccataatactcggtacgttacaaccaaatccgataatcatcggtataaaagacttcccgcttaaaccgaacgattccataatacgatccattaaaaccgcaatacgtgccatataacctgaatcttctaataaagatataaagaaaaagagcacaacaatttgtggtacaaagactaatactgatcctacaccagcaataatgccatctgtaattaaatcttgtaaaaatggtataacgccaagataattcataatcgtcttcacactatccgtaaatgtaccacctataaatgcatcgagttgatccgacaaaggtgtgccaatccatgtaaatgtagtttgaaagatcaaccacataatcgctagaaaaataggcatccctatatatttatgtgttaatatcttgtctattctagagctgaaatattgcttatcttcatctggatacgttaccacgtcttgcaataacgtctcaatataatgattgcgtatacgttccatctctcgacgaacagatacagcctctacttgttcagcaacttgatcacgtaaactcgacaatttatttacaacctctgaattaagttcatttgcaatttgcatgttatttagtaagaattgaatcgcaataaatctagcttgatatttatcatgagatgtctctgtcattattatttgacacatatttttaattgtctcttcaatcttctcaccataattgattttaaaatgcggttgatacccttcccctagatgctttatttcgccaagtaaatgtttagttcctttgcctgtacgtgccacaactggaaaaataggtgtttttaactttttcatcaatttatgataatcgatttttatcccgcgctttgtagctacatcaatcatatttaatccgatgtatattggttgattaagttctaacaattgtactgttaattgcatatttctttttagttgactcgcatcaacaatgttaatgattcctgaaaaagaatcgtttaataaatagtctgtcactacagtttcatctttagaaatcggcgataaatcatatgtacctggtaaatcaattaattgtcctacattttctttaagcttccctacttttttctctaccgttacgccactccagttgcctatatattcatacgaaccagttaaagcgttaaacaaagatgttttaccaacattaggatttcctaaaatacaataattttccattcgtccggctcctattcttctaatgcaatagaacaagcatcgcaatgtctaatacttaactgttgtccgtttacttcaataatacatggccctttaaataaacatttttgtttaatcgttatgatagcgtcatctgttaacccaaaggcacttagacgatacaacatattctcattagcaatatccattcgctttattttataagccttattcatttcaccatttttaatgtttaacatactatttcgctctcctattagaaataataatcattatcacttaaaaatcataacccttaaaattgtagctcgcaatactttatttaaataattttcatttttcatgtaaaatttgtgacattgcaaaaatgttttgtataatcgcttccatgcaaaaacccccacttcaaatgtcattgatagacatttaaagcggaggcatgtacatgttattttatgatttatttcttaagtttttttctaacaattgattgagcttttcaatatttttattcaactgttctatattcgtggcttgttgttttgaatttagttgatgcttgttttgataatccattaaagcatcatataagaacaatgaacttgctgattgctgtttcacttcttggtacaatgccatcgttttatcatctagtactattgaacgtgcatcatcttgtccatgtacatcttgatgtttcgatacatttgttgcaccttgtggatatactttaaaggttgtgtcgtatgtttccttactatctttagcttcagattcctgtgattcaaccgttttatatttttcaagtgcatgtccttcaatatcaactcgtggaataatacgattcaaccatgctggtaaataccacgaaccttttccaaacaatttagttaatgcaggaattaacatcattctgactacgaaggcatcaaagagtacaccaaacgctaatgccatacccattgatttaatcatgacatcttcttggaatacaaacgcaaagaagacactaaacatgattaatgcagctgctacaataacaggaccactttctttcaatcctactttgatagaataatcattatcccctgttttactatattcttcatgaattcgcgacataaggaagacttcgtaatccattgctaagccgaatagtataccaattgtaataaccggcaagaaggctagcattggtcctgtcgtttctataccgaataatcctttcataaagccatcttgcatcacaaaggttgtaaaacctagtgttgccattaatgacaagacaaatcctaaaactgcttttaacggtattaagattgaacggaagacaatcattaataagaaaaatgccaatacaacaattactgttgcaaataaaggtatcgcctcatttaactttttagacatatcaatattaatgacactttgtcctgaaatttccgttttaaatccatatttatcttgcgcatctttattataatctcgtaaatcatgcactaagtcatttgtactttctgcattaggcccttgcttaggtatcacgaccatcaaagcgtaatcattatctttactcatttgtggcggcgtaacaatatccacatttttcttatctttaatatctttatacacagattgtaaatcttgttgtaatccttgtggatcatcttttttatctttaacgttaatcagcatcggtatttggccattaaatccttcgccaaacttatctgaaataatatcgtatgcctttttctgagtagaatctgctggctttacgccatcatccggaatgccaagacgcatatgactaactggaatagccgctgcaactaatataattaaacctaataatactgctgcaagtgcattaccagtaataaatttagaccacggcgtatcaatatcttttttaaaattagactgcaatttgttcactttaatgtgtttatggaaaatactaattaacgcaggtaataaagtcagtgcactgaatacagcaaatataacactaattgccgaagcaaaccccatcactgctaagaaatctataccaactagcgataaaccgcatacggcaatcacaactgtcacaccagcgaagatgactgcgctacctgctgttcccactgcaagaccaatgcctttaatgtaatctgtttcagttttcataacttgtcgatatctgaataaaataaataatgcataatcgataccaactgctagtccaatcattacggctaatgtcagtgtgacatttggtatatcgaatgcataagttaacaaactgataatacctacaccagaagctaaaccaattaatgcacttataattggtaatcctgcagcaataactgaaccgaatgtgattaacagtacaacaaatgcaacaataataccaactagttcagaattaccgcctacttctgtagatgtcattcctgtaccagttaactctgtttgtacattatgattgtcacgtaagtctttcaaatgacttttaacattatctctagagccatcttttaaagatgtttgactaacgtcatatgtgatatctgcaaatgcagttgttttatctttattaatttgcttattttcataaggatctgatattttatcaatgtgcttgtcatcttttttaatatcatctaacgttttcttaatatctttagtaatactcggttgcacaataccatcatctttagtcgtcttaaagacaacacgtatttgtgccttttcactatcttgattaaaatgtttttcaatctttttattcgtatctaacgactctagtcctgtcattttaatatcattgtcaaatttcggtgcatttgtagcaagtggtatcaatattgcagctacaatcactatccatgcaatgaccgcggaccatttatattttgcgatgaatgtccccatcttatataaaaattttgccgaagtatattgcctccttttaaaatcaacgttatagtttaactatacagtgtagattattgtttgattatagtatctatcaccgacctcttaaagaatcaattggaaaattttgtatattaaactacacacaaaggagaaatgtagatgaaagagactgatttacgagttataaagacaaaaaaagcattgtcgagtagcttgctacaattgttagaacagcaattattccaaacgattactgtcaatcaaatttgcgacaacgcactcgtacaccgcacaacattttataaacacttttatgataaatatgatcttctagagtatttgttcaatcaattgactaaagactactttgctagagatatcagtgaccgtcttaatcatccattccaaacgatgagtgatacgattaataataaagaggatttgagagaaatcgcagaattccaagaagaagacgctgaatttaataaagtattaaaaaatgtctgcattaaaattatgcataacgatatcaaaaataatagagaccgtatcgatattgacagcgacatcccagataatctcatattttatatttatgactcgttgattgaaggttttatacattggataaaagatgaaaaaattgactggcctggcgaagatattgataacattttccataaggtcattaatattaagattaaatagtaaattagaggctcataagcgttaccaacattcataataaaaacgatagtgtacacgttaatgaattcgtgtactactatcgttttttatttttatcgtgcttatcgctattaaaataactgatatacaacacataaactatgaagaaaaacataaatccgctatctaaatgactttgactcagttgtttaaatgaccaaattgctaatacaattcccattattattgaaataacgtatctcacattcttatacctagaatccttttctaaaaatatggttgctattacttaatttttaaagttataaataaaaagagccaaccgcaatggatggcccttgttcattatgaagcattagaacatttctgaaacaaccttttgttctaagaagtgtaataagtagtctgggctacctgttttagcgtccgtacctgacattttgaaaccaccaaatggatggtatccaacaactgctgaagtacagcctctgttaaggtataaattacctacatcaaattcgtttaccgctttaatccaatgctcgcgattatttgtaatcactgcaccagttaaaccgtaatctgtatcatttgcaacctcaattgcttcatcaaaatcgttaactttcacaaagccaacaactggaccaaaaatttcttcttgcatgattctatctttagatttaagtcctgaaatgattgttggttctacaaagtaaccttttgaatcatcagtgccgccaccttgttctaatttaccttcttctttaccaatttcaatataatttttaatcttatcaaattgttttttattaataactgggcccatatacgtattgtctacagtattacccaacgttaattcttttgttagtttaattgatttttctaatacttcgtcataaacgtctttatgcacaattgcacgtgaacatgctgaacatttttgaccagagaaaccaaacgctgacgttacaatagcttctgctgccatatctgtatcaatattttcatcaactacaatggcatctttaccgcccatttcagcgataacacgtttcaagaagttttgaccttcttgaacaacggcactacgttcataaattctagtacctgtcgcacgtgatcctgtaaatgtaacaaaatgcgtatctttatgatcaactaagtaatcaccaatttctttcggatcaccaggaacaaagttaactacgccttttggtaatcctgcttcttctaaaatttccattaatttataagcgatataaggtgtatcctcagcaggtttcaataacactgtattacctgccacaactggtgctaaagttgtaccagccataatcgcaaacgggaagttccacggtggaattgtaacacctgtaccaattgatttatagaaatatttattgtgttcaccttcacgatcaagtactggcttgccttgagccaagtccatcattgaacgtgcatagtattcaataaaatcaataccttcagctgcatcaccaactgcttcatcccatggcttacctgcttcataaaccataattgctgcaatttccgcttttcgacgacgaataattgccgaaacacgtaacataagctctgcacgatcatttgctgaccatgttttccaagatttataagcttcgttcgctgctttaaatgcatcttcaacatcttgttttgttgcctttgatgcatttgcaatcacttgtgatgtgtctgcaggattgattgatttaattttgtcatctttgaaaatcttctctccattaatcactaatggtatgtcttgacctaattctttttccacgtctttcaatgctttcttaaacatatccacattttcttggactgaaaaatcgtaaccaggttcatttttaaattctactaccatgtacacttaccccctataaattttgaaagtggtttaaccctttgatttaatgatataacatcatttaaactcattttactatgagtaaggtcggttttgcaatcgctttcatttttatgctttatcccttattctcaagtattttgaaattgattggttactttttaaaatttagaagtgtcatgacaactaatttagtgtttcatcgttcaatgcttctgatggtacctcattatcaattttacgaacgactttacaagggtttccaaccgctaaactgtgtggcggaatatctttggtgacaacactaccagcaccaatcacactgccttctccaatcgtcactcccggaagcacggctacatgtccgccaaaccaagtattactgccaatattaattggtcctgctttttcaaatccttcatttctatgatgaaaattaagtggatgtgttgctgtgtagaatccacaattaggtcctataaaaacattatcgccaattgtaatctgtccaccatccataaaataacaattggtgtttacatagacattttttcctagtttaacgttccaaccataatctgtatcaaaaggaatcgaaatacttacattgtctgttgttgtttgaaataattcatcgattaattcctttcttttatttttgtcactcggctttgtatgatttaattcaaagcaaatatctttcgctcgtgcacgttcattgattaagtcttgatcaaagtttgcatcgtaccatttttctgctaacattttttctttttcagtcattacacctttcaactcctaataacttatttacttgtttaatagttaatcaaataaacattcgcctatgcaactaataagctataacattatgaaatcataaccttatcactcttatctataccattctcgcatcaaatactgctaaagtagtagataaattcaatactacagacgcattcattttttaatctattaacgtaaaatgtgagtaagagaaatataaaggagtatgatagcgatgagaatattaattacaggcacagttgctatcttaatcattctaggtttagttaaaacgatacaagattacgaaatgacaaacgacacaagtcgtcagttgtcagacaacaaagatgacgataaagtcatccatcttaataatttcaaaaatttacatgcgaaagaatttaacccatctgatttcttttaagtcacctaagaattacaaatccagaagtcatttaagttttacctttcattcatacatcctttaatattaattacgacttcttttatatagatgctaaatagagagattgttgtgcaatgtttgcacggcaatctctctttttctttttaaaattggtaaaagtaaaacgcaacgattgacttatatacctatagggggtacattagacgtgtaacaatgaatcacagggaggcaataatgtggctaatacgaaaaaaacaacattagatatcactggtatgacttgtgccgcatgttcaaatcgtatcgaaaagaaactgaataaacttgatgacgttaatgcccaagtgaatttaactacagagaaagcaactgttgagtataaccctgatcaacatgatgtccaagaatttattaatacgattcaacatttaggttacggtgtcgctgtagaaactgtcgaattagacattacaggcatgacttgtgctgcatgctcaagccgtattgaaaaagtgttaaataaaatggacggcgttcaaaatgcaacggtcaatttaacaacggagcaagctaaagttgactattatcctgaagaaacagatgctgataaacttgtcactcgcattcaaaaattaggttatgacgcatctattaaagataataatagagatcaaacgtcacgcaaagctgaagcgctacaacataaattgattaagcttatcatatcagcagtattatctttaccgctattaatgttaatgtttgtacatcttttcaatatgcatataccagcactatttacgaatccatggttccaatttattttagctacacctgtacaatttattattggatggcaattttatgtaggtgcttataaaaatttaagaaatggtggcgccaatatggatgtacttgttgctgttggtacaagtgcagcatatttttacagtatttatgaaatggttcgttggctaaatggctcaacaacacaaccgcatttatactttgaaacaagcgccgtactaattaccttaatcttattcggtaagtatttagaagctagagcgaagtctcaaacaaccaatgcgcttggcgaattattaagtttacaagctaaagaagcacgcattttaaaagacggtaatgaagtgatgattcctctaaatgaggtacatgttggagatacacttatcgttaaaccaggtgaaaagatacctgttgatggcaaaattattaaaggtatgactgccatcgacgaatctatgttaacaggtgaatctatccctgttgagaagaatgttgatgatactgtaattggttcaacgatgaacaaaaacggtactattactatgacagcaacaaaagttggcggggacactgcattggcaaatattattaaagttgtcgaagaagctcaaagttctaaagcgccgattcagcgattggcagatattatttctggttatttcgttcctatcgttgttggtatcgcactattaacatttatcgtgtggattactttagttacaccaggtacatttgaacctgcacttgttgcgagtatttccgttctcgtcattgcttgtccatgcgcattaggacttgctacaccaacttctattatggtaggtactggtcgcgctgctgaaaatggtattttatttaaaggtggcgagtttgttgaacgcacacatcaaattgataccatcgttttagataagacgggtaccattacaaatggttgtccagtcgtgacagattatcatggtgacgatcaaacgctacaactacttgctactgctgaaaaagattctgaacacccattggcagaagccattgtcaattatgcaaaagaaaagcaattaacattaactgagacaacaacatttaaagcagtacctggccatggtattgaagcaacgattgatcatcaccatatattggttggtaaccgtaaattaatggctgacaatgatattagcttgcctaagcatatttctgatgatttaacacattatgaacgagatggtaaaactgctatgctcattgctgttaattattcattaactggtatcatcgcagtggcagatactgtaaaagatcatgccaaagatgctataaaacaattgcatgatatgggcattgaagttgccatgttaactggcgataataaaaacactgctcaagccattgcaaagcaagtaggcatagatactgttattgcagatattttaccagaagaaaaagctgcacaaataacgaaactacagcaacaaggtaagaaggttgcgatggttggtgacggtgtaaatgatgcacctgcattagttaaagctgatatcggtatcgccattggtacaggtacagaagttgctattgaagcggctgatattactattcttggtggcgacttgatgcttattcctaaagccatttatgcaagtaaagcaaccattcgtaatattcgtcaaaatctattttgggcattcggctataatattgccggtatccctatagctgcattaggcttacttgcgccatgggttgctggtgctgcaatggcactaagttcagtaagtgttgtcacaaacgcacttagattgaaaaagatgcgattagaaccacgccgtaaagatgcctagattccttaataatgaaggattcgttggtgattctgagataggctagtgattggctctataatgtcgcggtttacagttggatcttcgctccaactgcatatatagttacacttttcgcttggcgaattagtgtatcttgggagtgggacagaaatgatattttcgtaaaatttatttcgtcgtcccaccccaacttgcattgtctgtagaaattgggaatccaatttctctatgttggggccccgccggcaaggttgactagagttgaaaaaagcttgttacaagcgtattttcgttcagtcaactactgccaatataactttgtagagcattgaacattgatttatgtctcagactctacaatattattacaaataataagtacactatggtttacagttggatcttcgctccaactgcataagagccactaattattataaataataagtacactatggtttacagttggatcttcgctccaactgcataagagccactaattattataaataataagtggctctaaaaggaggtgaatgctatgtcacaagaaattttaaatgttgaaggtatgagctgtggtcactgcaaaagtgctgttgaatctgcattaaataatattgacggtgtcacttcagctgaagttaaccttgaaaatggtcaagtaagtgttcaatatgatgacagtaaagttgctgtatctcaaatgaaagacgcaattgaagatcaaggttacgatgtcgtttaattaggcaatattcaacgtcatcaacaccaaattaaaaaatcgaactgatgagaatcccaacaatccaaattatctcatcagttcgatttttaatttactcgtaacctagtatctccagtctgcaatacatctaatgttgcatctaatgcatcaacaattagattttcaactgcagcttcagtataaaacgcaatatgtggtgttaatatgacatcttccctgtcaatcaacgattctaacaatagatcgttcagtgttttgcccctttgatcacttgggaaaagtttgcgttcaaattcatacgtatcaagtgctgcacctttaatcacaccattgtctaatgcgtctaataaagccttagtatctactaaagaacctctcgcacaattgacaaatactgcgtcctttttaaaatgtttaaataattcagcattaaatagataatgattatatttcgttgcaggtacatgtaatgtcacgatatcagcaccttcaaccgcttcctcaatcgtatctttgtaatcgacatacgttgcaattttagcattaggaaacgggtcgtatgcgaccacatcactttgataaccattggcaaatatatcggctactacacggccaattcgacctgtaccaataacagctacttttaaatctttaatggatttcgataaaatagtaggttcccatctaaaatcatgctctcgcactttcgtttgaatttgattaaaatgacgaaccacattaatagcctggttcacagcaaactccgcaattgaattcggagagtatgacggcacatttgacacaatcaagttatacttgtttgctaactccaaatcatatgtgtcaaatccagcactacgttgtgcgatttgtttaatacctagttcatttaatcgtttataaacatgctctgataatggtatttgttgtgatagcgataagccatcataaccagcgacaccttcaacattgtcatcagttaatgcttctttagtaatatctacctcaacatgatgtttctctgcccacgccttgatataaggcatatcttcatcacgtacactcatgattttaatttttgtcattttaacatcacccttaactttattattcatataaatatgctagttctgttaatcttattgcagcttcgtctaattgctggtcatctaacgccaatgagattctcacataacgattaccattctctccaaatggtttccctggagcaacaagtattgacttctctttcactaaaaattgctcaaattgctcgctgtcataaccaggcggtgtttccaaccatacatatatgccacctttagcatgaaaaaatggcaaatcagcttttgtaagcatggcttcgaatcggtcacgacgtgctttaaatacattgctttgttcttctaaaaaatcatcataatgattcaaagcatatattgcggcatcttgtaatgcaccaaacatcccagcatttgtgtgcgtttggtactttttcaaagcttgaatcatatctttattaccaactgcaaaaccgactctaaaacctgacatgttataacctttagacaaggaataaatttcaatcgcaacatctttcccattttccgaagcaagtatactaggatttttagcgtcgaaaccgaaggcaccataagcaaaatcatgcacgattttagtgtctgtatctttaaatttagctatcgcttcatcaaaaacttctttcgtagctgtcgatccagttggattatttggatacgttaaataaatgagttttgttttatctattatttttgaatcaactttggaccaatctggcaaataatgcggcggttctaaattaagcggaacaggcttgccatcagctaaaagtacacctgctaaataatcagtgtagcctgggtcaggtagtaatacatagtctcctggattgataacacatgttggtactgccactaatccattttttgtaccatataaaatacatacttcatcttctttatctaacgtcacattatattgtctttgataaaaatctacaatagcttgcttgaacgcttctttaccatgaaaagcaccatatttttgattttcaggaatagttagtgctttttgaaaatgatcaataataccttgtggcgtgggcccatcagggattccaactgccatattaattaatggcaatggtccatgttcgattttacgtcccatcgttttcccaaaataactatcagggatatttgctaatttgttagagatcatcaaattcctcctctatcattaaacatagcctgggcgactatcataatcctaacaacttgtatcactctcatttagatggttacaatgacatcgccattcaccgttatcttcaacagatcttatgacacacgttgtattgaatgaatttattttcattttaggtaggtacaatattattgtcaatattaggaattttcagattaatatacgctcaatcgttaggatttaactgccatgcatatccgcatgcgcaaccagttagatatgcttatataaagtataacgcccatcaaggtacgtattcaaacgtgaaccttaacaggcgtcattcattgttaaataaaacttcttaagcacatacttatttcactatgccttttacgttccccttatacttttctcacatctttctcttagactactcccttacacgccttgctcaatatctttaatcatttcatctacagttattttcgcactcgttaagacaataggaacgcctgcacctggatgcgtacttgcacctgcaaaatataaatctttataatctcgcgatacattttgtggacgataataattactttgcgctaaagttggcattaaaccgaatgccgaaccaaatttcgcatgatacgtttgctcaaaatcatttggcgtaaagattgtttctgaaacaatatgcgattttatatcttcaaatacttcaatagttgctaatttacgataaataacatcttttatttggtctgttaatgcttcatctgaccaatcgattccgctacctgttttaagttctggtgttggcattaaaacataaatacctgtttgtccttgtggtgcaagagatttgtcagcaaccgcaggaacatacacataaatagaaggatcatgcgataatcgcccttcaaatatttcttcaatgtttcctctaaaatcatctgcaaaaataacattatgaagtctcacttgatctgtcacatcaatatctataccgatatacattaaaaatgctgaacaagagtaatctaagtctgcaattttatgtggtggatactttttaataggtgcaaaatctggcattaatgattccgcaacactagggaaatcagccgtacataaaattttatcaaattttcttatgtcaccattcacttttatcgcatcggctcgtttgaatttaggatcaataataatttgctcaatttcagcattaagttcaatattaacgcctaaatctttatttaattgcgctagcccttgagccatgccatacataccgcctttaataaaatgcacaccaaacatcatttcaatcataggaataattgaatatagtgacgggcctcgttttggatcaattcctatgtataacgtttgaaacgctaaaagcttttgtatcttttcgttatcaatataatgttcaattagctgatctgcatgatttaacgtttttaacttagcaccttgcacaagtgacgtcatattataaaagtcacttggtttgcgatacgttctttctaagaaatagcgacgtgcaatttcatattttttataaacatccgttaaaaaggacataaaaccatgcgttgaaccaggttctatactttctagcatgtgctgtaattcagctaaatctgtaggcaccgttatacaatcatcgcggtcaaaatacacatcgtaaatataacgtaattgtctcaattcaatataatcttcataatttttaccacacattgtaaatacatctttataaacatctggcatcatgacaattgtggggcccatatcaaatgtaaagccatctttctttaattgattcatacgcccgcctacattattatttttttcaaatatcgtcacttcatgaccttgagaagcaatacgggctgccgctgctaatcctgtgacacctgcaccaatcactgcaatcttcattattcaaccacctatattctatgatatttactatttatttcatgaaacaactttgcttttttcctcttctccacaaaaacacgttcatgtaatgtatagttagcctgtctcacttcgtccagtatttcaatatatatacgtgctgctaattctatgattggttgtgcttcaatactaaatactttgatttgatccataacatctcgaaaatctttttctgcgatagctgcataatattcccataagtcaatataatgattattaacaccattttggtacacttcagcaatatcaacttcatattgctttaatcgttgcttactaaaatatatccgttcattttcaaaatcttcaccgacatctcttaatatattaatcaattgcaacgattcaccaagccttcttgcgacatcgtaagtctgatgcgtttcatgatcacttaaaatcggcgtcaatacttcacctactgtaccagcaacaccataacaatatccgaataattcagcgtccgtttcaaacattgtaaaatgttgatctttatatacagtatcaatgagattatagaaagattgaaaggcgatatttttatgttgtgcaacatgctgaagggccatcatgattctacgatcactttgaaagtgatgatattcatatgggtatttttcaatagattgtatatcttcttttatttgatttaaaaattgaatatcgccataaacatctatactgtcatcaattttacgacacacagcataaattgcccaaaccgcttttctttgatcttctggtaacaagtcaaaagcgtaagaaaagctttttgaatgtttcttcatgattttatgacaatatttaaaattcatatccatcattgtcatactagtcctcctatattgaaatgccattaccttgatttattgttctttagatatagaatattgacgacctttccattcaactacaccataacgatgcatttgtttccaagattggatgaaaattttagtaaaaaacataaataacaatggatgacataccattaataaattagaaaattggccgacccttcgatgcagataaataaattgtgtagtatagctcaagtaaactgttaacatttttcctacagacatttggcgatattttaaactaagacatagccctaaaatactcgcaatagaaccgaacaaccacaacacaattgctgccatgatcttaggctttgtgccacctgccccagtcgacaaatgctttgtccatccttcttgtaatgactgaaatccttcttgatacatgcgaaatgcaacaaatggaaatccttcataaactgttacgggcaatgattgtgaagtatatgcacttcctaaagcaaatccttcaataatatgacggttcgcacttttatgacctccagttgcataataatcttctttatttgttaatgtcaccggtccaaatgcatgctggttagtccgaccgtcgtctaaggtagaaaatacattcataccaacgactgtcattaaattaaatattgctgaaaacccttcgtagaaacgctttgttatatgataaggctgtacgcttaacaatcctttttcaccttgtaattgatactgattaatcaacgcttcaacagcatctttccttaagaaagttacatcagcatctacaaaagcaatacgattcgtacatgcatgcgtcacaccttgataacaagcatgtgatttcccataccatttgccgtcagcatcatcaacaacatctactacagtcgcaccatatgaacgcgctacacatgctgtttcatctgtcgatccgtcattcataacaatgacatctactggaacttgctgttgtattatcgaatgtagtaaatgacctattcttttttcttcgtttctagccggaataataattgttaatgctttatgattgaagttcagcgttttcgcctttagctgatgtctacgattaaatatcaatgcaccacacgccatagacatggtcactattactgttaatattcgtgataaccatttcatagatatcacttcctattcttcgcttctcgcgcgtttattttgtctgcgacttgttgcccacttaatgtaaccattggcatgccaccaccaggatttactgatccccctacaaagtacaagttttcaaaatactgactttctttaggaaatttaaatcctttgtttttctttttatctgctacaacaccatatattgcaccacgattagaacgataatttttttcaatatcctccggtgtccaaacatcttcataaataatgtgttttcttaaatcagtgagtcccattttttctaatttatccaaaattttatccctaaacttcgcataatcttcagttgtaaaaggctggtcttgaatatatggaatatgtggtaagactttgatattttcataacctactggcgcttgtgtgtgatcagttttattcgtatttactaaataaatggtcggatcatctggcaataccttttcatgaaaaacttgttgataattgagataagcattttccgtaaaaaagaaattatgatgtgctaattgcgggtattggcaagcaacacctaaatgcatcacatatcctgagcttgctggctcaaattcccgctctaatttgtttaatcgttgagtatcaaggtgaagtaaatatttataagtaggtatgacttccatatttgaaataatataatctgcctttacaaactcacctgtatctaatctgacacccgtcacacatctttcatatgttttaatattgtccacacgtgtacctgtatgaattgtgacaccttcttcacgcgctagcttttccaaggcattggctaaatgatggattccaccttctacataccaaaggccttgctcttgttgcatatggaataacatagataatacagctggcgcatcgtacgatgaagaacctacatatttgataaaatagcctaacatttgtcgcaagtatggattcgagatacgcttgtctatggcctgttgcatagtatgtacataatcataattaataagtgcatttaatggcccatgaaatttaataatttgagatagtgtatctaaaccatagttaaaataccctttttcagtaatacgatcgattcgtcttgtataattcaaataattttgcagttcctctatatcctgtttcgacaatatcgcattatgctgacctgtttctttaataccttcatacaaatcgatagtcgttccatctggaaaaaagctacgccattgatgtggcaatcgcttgattgtaacgtagtctgacatttgcttcttgctatattcgaataatttttcaaaaatataaggcatcgttaaaatagatggacctaaatcaaagccaaagtcatctgactcatgacgattcactttgcctcctatatgattattttgttcatataatgagaccgaatagccactttgtgccattcgaattgctgcagaaatcccacctaagccaccaccaataacgatgatatgtttagtcatgacgttcacctcttcgttttaatatgcgtagtaactgcgttaatctcggtcgattatagcgttgcacaataatgattggaacattagctatcattgcatagaaaatatttatatactttactacacgagggcctttattgaatataatgactggaagtatcgatatccaatgaatcaactctgccctctttgtctctataatcattttttcgatttcatcaatattgattgtcattaaatgacgctgatcatatatatttcgattaagcttatgaccatctaaaatcttatgcttccattttcttacgtaaaaccatttgttccaaaattttccatgcttctcaaagttaaatgatttaaatattatatgcttctgacgaaaatacttgtcaggaattcttgtacctaaatttgctatatttagttgaacaattaaccaatacatactacagaaaaatgctgttttgatatattttttcatgattttcatctaaattgaatcactctcaatcatactgacatagtataaattatcattttattacttagttccctaaagatcagtgaataaaccgctctcatttatatttatatttatataaaacaaaaacgccaatactctcatgttagagaatattgacgtcatttgatttacatttgattaatgaatgaaattatatgaacctgcttggtttgctgaaattgtacgagatgtaaccacaccagcaccatgtccatagttcatttctgaaacacgaacagaaccgttgctgttaacgccttcaacgtaagcaacatgaccgtaatagccttgtgttgtttgcatgatagcaccagcttttggtgtattgttcactgtatagccagatgatgcagctgcgctagcccaattactagcattgccccatgttgaaccaattttcccaccaacacgatcaaatacataataagtacattgtcctgaagtatataagttacttcctgatgcataaccattagaaattgaacgaccatttgaagatggcgctgcagttgtagtcacatgaacattattgcttgttgtgctataacttgcacctgaaccaccagtgtaatagttatttgttgctgtttggctattgtttgtatagttattgtattgatatgaatgattatagtagttattgtaagatgcattgttataactataagtattgtagttattgtaatagtatgtgttgttttgcgttaattgacttggattccaatttcctgtccaagtgtaatgataattaccttgtgcatcaattgtatacgtatagctgtatgattgagcgtcattagaattatatccattgttattttgttctgcggcttgtgcatcatgtcctgcaaatgcgatagtggcaagtcctgctgtagcgattgtagctgtaacgatttttttcataattaaatatcctcccaataatcaaaacactctatacatatagtcattagcgactcaattattttaaattttgtattttttatttttttagtatgcaaataattataacttttatagttttgcgacaaaacaaactataacagagattaggtaccttgtggtctttgttatcataatgtaatctgttcctaacaaagcatcattgaatgtaatataccaattagaatgtttacaacactttttctgcaccgttaacatgggatttgaaaataaaaaagcactaaacttttaatgaaatacatcctttttgataataaatatcagaagtaatgtaatatttcaaaagtttagtgcatcaaattatttcttatttgtagcatgtgtttccatcgtttttacaatcaaatcagtcagcgctttactacctgcatattctaagtgaataccgtcatatgcaaagtactccggatgacctgcagaagctttataccaatcgactagatgtacattagagcgcttttcagctgcctcataaattaatttatttattctaccttcataatctctaggtactctaatagaaactaaatatatgtctgcttttccaaaactatccaatagttcatttaattgatctttcgtaaatgccccatttgtaccaagctctactacaactttttgaccttttttagcatagtctttatattgcgatttcacaattggtgtagcatcaacgagttgccgtccaactttaccatcaatttgtgcatttggtattttcttagtaaagacattaccaatatccaccataaccgagtcaccaattaatagtggtgatgactttttaatatcctctttactattcgccgtctgcttatcctcttgcttatcttttttaacgacctttttcttcgttgttttaaattccgtcttcttctctttcttctcagcttcatgttgtttaccaagcgcatcaaattgcccactgagaacgatgatagatggaatcaataataagataactaacacagttctagcaaattgactcttctttttaggtaaaaatgcaaaagctttaaatccttttttacgtataggtgtttcaataaagcgatacgaaatttcagccattaacgctgttaacaaaatttctataatataaacgtataccggtatttgtccttgtacgtaataactgttcacaaaaacaatgataggataatgccataaatataagctatatgatcgtttacctataattagtaaaggtttcatacttaaaaatttagcaaataaactagaaggatgtaccgcaatcgcaataatgaataaagttgcaaatgatataatgtaaaatcctccattatagatccattgatcttggtctccaactataaagaacaaagtcattagaaccgcaaaaccagatatccctataatatctaatgatacgacaatctttttagaaatatcttttttcaaagcaaacggaggccaaataaatgctaatatacaaccaagcaataaagtttgcaatcgtgtatctgtcccaaaatacacacgtgaattatctccagtgatgaaatgaatcactatcataagtcctaaagaaatcaacgatacaataaatagcgtttgaataatatttctcggtctaaatctatgtaataagaacgtgataaccaatgggaaaagcaagtaaaattgttcttcaatggctaaagaccataaatgtttgagtggttcaatagcaaattggttaaaataatctacattctgtgaaatgtaccaccagtttgaaacatagaatatagctgcaatagcatctcgtttcatttgtataatcaattccggtttaaatatcaaggtgaacgtaagcacgacacagattaaaaataacactgccggaatgagtcgtttcaatcgtcgcttccaaaactctagcaaatcgattttttgcgtccgataatactcacttatcaacaaacttgttattaaataacctgaaataacgaagaatgtatctactcctaaaaagcccccacttaaccattgtgcattcaagtgataaataatgattcctataactgcgaatgccctcaatccatctaatccgggtaagtatcgcggggaatacattttttctaaacgtttaaagtcttttgtatccatgttaataaacgccccatttatttttctctattttgtagcatatcacaatatttttgaaaataaaatattgcactgattttcattaattgatttaacccttaattaagatagttttaaattttttattaagtagaaaacaattattacagttaatttcattactgcaaaccacatataaatttgtcgattttactacataacatagattatcatagattcttgaatttttagcaaaataactgttattttcattatatttttacaaaaaaggttcgttttatattttatgcatcttactgtaacagaatcattaagatatgctattcggaatttactttttcaaaatttctataatgaataaattaccgcgcactgttattaaaatatatacacggtgatatctttccacctctctttcaaatttaaccatatgaaatgacaaatactcactccatattgaagtatttgtgtaaaaagaatcatggtatattgtatatttcgccttattctaatttaatagtgacattaattcttctatcatgacattaaaatcgtcaggaataataaaataacatcctaacctatgaatcagactttaatttctaataaaaaaactctccccaatttctatgggaagagctatatatttaatgtttaaacattacttttatttattatgaaggaattagaatccccaagcacctaaaccttgtgctttgtatgctttaacagctgcgttgatttgttggtcaacagtgtttgttgggccccaacctggcatagtttggaataaacctgaagcacctgatgggttgtaagcatttacttgaccatttgattcacgagcgatgattgcagcccatgtagaagctggaacaccagtacgttgagccatgatttgagctgctgatgaaccagtagcacctgcagtattaccattgcttaatctcactgaacttgaagtagttgaagtgctgtagttatggtaagttggagctgaaacagcttcaacgtttgagttacttgattgtgcattgtagcttactgattgtacatttgaaccttggttgtatgaagtagtgtagtctgcacctgcaacgtttgagaaaccagcagtttgaccattagctgcttcatagctccatgaccatgtagtaccatttgaagtaaagttatattggaaaccatcttttacaaagtggatgtcatatgcaccatctttgattggagctgcatttaattgatcttgatgattatgcgctaagtcaactaagtgtgcttgatcaacgtttacttcagcagcgtgtgcttgatgtcctgtacctgctgcgtaacctgttacacctaatgccactgctaatgatgatgccataattgtctttttcatagtaaaaaatcctccagtaataattgtaagtttatgtttttagtaattatattttgaatttgaatgtcgtagtgcaagtttaaattgtcttttatttctttcaacggtactcactatatcataaaaaagtagcaagtaaattacactttctttacaaaacattacaatatcaggtgttatttgtaatgttgaaatatggttgttttatactgtaatgtgaaatatgtttcttttagaatctaatcaatccttgaaataagcataaatgcataagttttttactatatttagctcaactattacagctttcgtaatattacagattgtatttttgttacacgcctgtaacattaccgtcatcaaatataacttaaattgattaattaaacacaattaaaaagcaatcaatacatagattccctcacatgtattgattgctattattgttatatattcaaagttttaaaacacatatcttttgtgtattgacttatcttttataagcacaaataaactgcagctcaattatattgctaaactttattctcgcaattcacaataacattaaataatttttggtctaatattttcaaaaaacatattgtccttatcccatgaatttaaaaatatcattagtatataaacgaaacactttacgataaatgatatctgcaagccaagctgttacaaatggtacaacaaagaacgctactacaattagtaagacactcaaccaagcagaatcaacctccataaatttaaatgcattaatcggtcctaccattcctataaaaccaaatccagctgactctttcgttccatgaatacctactaatgctgataccaagcctgatacaatggctgtcgtcaatattggtaacataagaattggatatttcaccatattaggtatcatcattttaacgcctccaaagaagacggataacggcacccctaaacgatttactttacttgtaccaattatcaatactgcttcagtcgcggaaataccaattgacgctgatccagctgctaaacctgtaatacctatcgcaaaggcaatggccacagttgatagtggcgaaataataataagactaaataccattgaaatcaaaatactcatgacaattggttgtaattctgtaaaaccattaaccatattaccgatggctgttgtaatcattttcgtatacggcaatattaaaataccaattgcacctgaaataccgccaacaactgttgggaatacaatcaaagccatactacctacacgatgttgaataagtaaaatgaacaacactgcaatcgctgctgtaatcattgtattaattaaatcaccaatacccgtaatcatccaagcaccatttttaaactgcgctgcaccgcttcctacatatgctgcacttgccacaacagcaattgctaatggcgataggtcaaatttcatggcaaccaatgcaccaatcaaagcaggtactgtaaattgaattgcaacgacaacgcctaataacgttttaaaaatcggatgataatccataaagtatttaaaaatttctccaagtatcgcattaggaactaaacccgcaacaatacctatggcgacacctgataaaactctaaatataaaatctttgggtgtaattgttttaattgatgtcataatatcatccttccatttatgtatatacatctttatgcaaataataaagagccttaagttataagctgccactagcttaaattctaagatgtgcatgccgatgttgttatatttaggctagcagtatcatctataactcaagactatgaaaaatagtatatcacaaaattctgaatttttagataaagaaattggcaatttttcaatcatattgttacaatacactttttattttatcttcatttttaaaatccattaatataatagaagaaagacattcaaatgcttaccaaaaagatacattatttgttaggagcgtatcagcacttacatatcatcaacacaattgacaacataatagaagatactgataataagtgttaaaacaacagatgttaggtagtgaacaaatgacggaaagtaaatccatagatccaagaatcgttagaaccaaacaattgcttgtcgatgcttttcttaaaatttctagagaaaagaaattgtctcaaattacagttaaagatatcactgatattgctacgttaaatcgtgcaacattttacgctcatttcactgataaagaagacctcctagactacacattgtctgtaaccattttaaaagacttgaatgataacttgagcatttctaatgtcattaatgaaaaggtactgcgtaatattttcatttcaattgcgagttatatcaaagatgctgcaaagtcttgcgaattaaatagtgaagcattttgcaacaaagcacatcaacgtattaataatgaattagaagatatttttgcgattatgttagaaaacagctacccagagcatcaacgagatatcattgtaaatagtgggagttttttagcagctggtatatcaggcttagcattacattggtttaacacgagtcaagaaacagccgatgtgtttatcgatcgcaaccttccatttttaattcatcatatagcacatttttaataaaacttggtatttagtcatgcatcttgaaatcactatgtgacttaggttcatacttgtacacacaataaaatttaacgtattacgattgattagccgtgtctaggacataaatcaacgtcctatactctacaaagccatattggcagtcgttaactgaatgaaaataagcttgtcattaaaacatatagattttagtgacaagcatttttgtttttgcgtacttaaacaacacttcaggcaatatgttgtttaggcaacaaatgatatgtccgtgtttattggcaaacgtacgacatagtagtatagtatgtctaaacaacacatgtcgcatagttgatacgcgttgtttaaatactaagataggagggattggcgtgagcgagacagatgaacctcaagggtttgaacacacgcataacagattaaatattaatcagaatagtcagagtctaatgacattcattacaagtaaattgaagtcgaagttgaagcagcacataataattgctcgtggtaataagcgaatcgactatcgactgtcgtataacttttacactacgtattatgataatgtagaaatcaagaaaatcgactgtgaatatacctatgcgatggccattgcaattttaataagacacacgatgtcattcgacaatgctcatttctttgctcagttacgtcatcctgtcttataaaacaacattgcagacatgtatatcaaacggcacttcaataacatcactttgccgtcgtactactattaaaatcgtgtctcaaaccccttattttaattccaaaaatctgctggtcaaaagacccagaaactaaaaacattactgaatgtgttgataaattacctgatagaaataatctcaaaatatatcaacacttgattctaaggaggatatgacaatatgaaaattttagatagaattaatgaacttgcaaataaagaaaaagtacaaccacttactgtagctgaaaaacaagaacaacatgcattgcgccaagactacttaagcatgatccggggacaagtattaacaacattttccacaataaaagtggttgatccaatcggtcaggatgtcacaccagataaagtttatgatcttcgccaacaatacggttatattcaaaattaatatttgctcacgaggtattgcacttaaggtgccaactgacctcataaacaaagcccatactgattgaagacactaatgtgtcgcaccatgtctcttacgacatgcgcacattacgcttcatctctgtatgggctttttatttattcttttgagaatttcattttagcagactaaaaaattaaaatggtgtccatcaagatctttgaacattgcaccataaaacccttggcttactgttggttcttgaacgactgtgccacccgcttctttcactttattcaccaactggtcaacttcttcatttgtattcacacctaaagaaatcatcacttcatttggttcagtgttaaggctttgctgacttacattttgaaaatgcttgttttctattaaaattacggttgtttgacctatttgaatgcctaccattttatctaacatttgtgggtttctatttattttaaatcctaacgctttataaaactgtgcgctcttttctaaatcttgcacatgcaaattaaaccacattgattgaatcatgattgcaccccattcattacttattatagtcttggactttaagccaatcacttaatgataatcttgttggatttatttcagccattaattcaaagtctacttcataacctttttcttccaaccattgcttttctgcaacaccactaacaaattctccttctataacagtcgatttacctgtcacttcactaaaaattgttgctgcttcacttaatgtaacttcatcggaaccaatctctattgattgatgcgtaaagctttgtagatgttcaaaaacatacgatgcaattttagctatatcaatagaagaaatcattgtgaattttatattcggattaataaattctggtaatgtaatacgttcatcttcgactttagcaatacgtaaaaaattatccataaagaatgatggtttgataactgttgcatttatattagattccattaatctattttctatttttgctagtacttcaaagtgtgggcctgttcgatttcgattaacccctcccgcagtgctatacacaatatgttgaatattttcttgctcagctatttcaattatcttcataccttgtcttaattcttcgctaacatcatctttaacgattggctgaatactgtataaaccatacttccctttcatcgctgattgcaaactaacactatcactcagatcaccttcaacgattgataaatgcggatgtcctatgtctgaaagtttacgattattcttatttctagttaatgcacttacataccatccatcctctaacaactgttttacaactgcattaccttgcttccctgttgcgcctattactaaaatatctttcattttagatccactccccttttatcttaaaaaccaatagtcctctttttcaccttttaaatacgtatatggttctggtgtttgtccattttccttaatattgtcatttattacatctctgacatcccatactaaatgaataaatcgttgtaattgatgactaaaaatgcctagtggcgctttcatagctaatgctttttccacatcttctgtagtaacattcagttttcctgcaatcatttgaaccgataaggtagattcttcaaaatgtgcttgcaattcttcagctgtaatacgtctttgctctttatttaaagacatacgcaacactcttttcttttatgatatttaatagttattgcaaattcattgctaactttcttaacacgttttataataaacggagagttatccgtttgtcaattttagagaactataagtaggtggaatcatgcgaaaagatgcaaaagagaataggcaacgaattgaagaaatagcgcacaaactttttgatgaagaaggcgttgaaaacattagtatgaatcgtattgctaaagaactaggtatcggtatggggacattgtatcgacattttaaagataaaagcgatttatgctactacgtcatacaaagagaccttgatatttttatcactcattttaagcaaattaaagatgactatcattctaattatgaggttatgcaagtgtcgttagattatcttttacaatttaaaatcgaccataaggcactactgcaatgtattgaagcaggcaacaataaattacgtttttaccaaagcgcattttatcaagaattattttatttttattatgacttgtttaaaagcgatgacgacatttacacgaagttcaaaacagatatgctgttgcaagcattatcaacacgtgtatttgatttccaaatagaacatcgcaatatttcaattgaagcgtatagaaattatttattaaacatttatttagatgaggtggaacgtaatgactaaaattgtgttaatcacaggtggtaataaaggattaggctatgcaagtgcggaggcacttaaagcattgggctacaaagtgtatataggttctcgtaatgacgtaagaggacaacaagcatctcaaaaattaggtgttcattatgtacagttagatgttacaagtgactactctgtcaaaaatgcttataacatgattgctgaaaaagaaggtcgtcttgatatcctcattaacaatgcaggtatatctggtcaattttcaacaccttctaaattgacacctcgtgacgttgaagaagtatatcaaacgaatgtatttggtatcgttcgaatgatgaacacattcgtccctctcttagaaaaatctgaacaacctgttgtcgtcaacgtatcaagtggtttaggttcatttggaatggttacaaaccccgaaacagctgaatctaaagtgaattcattagcttattgttcgtctaaatcggcagtaacaatgctaacattacaatacgctaaaggattaccaaatatgcaaatcaatgctgctgatccaggtgctacaaacactgatttagttggtgattttagtaataattcaaaacatgtttctgaagggatcaagccaatcattcaattagcaaccattgatgcagatggcccgacaggtacatttattaatgggaatggtgaaatgccttggtaatccaaatttatgttacaaatattgaatttagaggtaaataaaaatgcttctgcaatagatgcaatatacatgcaaaacaatatggaggcgaatcaaatgaaaagtattacgtttgaagaacattatgtcattgaagatattcaaaaagaaacgatgaatgcgatatcggcagatcctaaaggtgtgccgatgaaagtaatgttagaaggccttgaaaaaaagacaggttttacaaatgccgacgaattatcacatcatgatgaacgtatccaatttatgaataatcaagacgttcaaattcaagtcttatcttatggaaatgggtctccttcaaatttagttggtcagaaagccattgaattatgtcaaaaagcaaatgatcaattggcaaactatattgcacaatatcccaatcgctttgtaggctttgcaactttacctatcaatgagcctgaagccgcagcgcgagaattcgaacgttgcatcaatgatttaggattcaaaggtgcgctcattatgggacgtgcacaagatggttttcttgatcaagacaaatatgacattattttcaaaacagctgaaaatttaggcgtaccgatttatctacatcccgcgccagttaacagtgacatttatcaatcatactataaaggaaattatcctgaagtaaccgcggcaacatttgcttgttttggttatggttggcacattgatgttggtattcatgcaatacatctagtattatccggcatttttgaccgttatccaaagttaaatatgattattggacattggggtgagtttatcccattcttcttagaacgtatggatgaagctttattcgctgaacatttgaaccaccctgtaagctattactttaaaaataatttttatatcacaccgagtggtatgttaacgaagccacagtttgatttagtcaagaaagaagcaggtattgatagaattctttatgctgctgattatccatatattgagcctgaaaaattaggtgtatttttagatgaactgggtttaacagatgaagaaaaagagaaaataagttatacaaatggtgctaaattattaggtttatcatctaacaattaacaaatggaggtcattgaatatggaaactttagaattacaaggcgctaaattacgctaccaccaagtcggacaaggacccgtgctcatctttattcctggtgcaaacggtaccggagacatttttctacctcttgcagaacagttaaaagaccattttactgttgtagccgttgatcgtcgtgattatggagaaagcgagttagctgaaccactccctgattccgcttctaaccctgacagtgattatcgtgtcaaacgcgacgcacaggacattgccgaacttgcaaagtcattaagtgatgaacctgtctatatattaggttcaagttcaggttcaatcgttgcgatgcatgtgttaaaagattaccctgaagtcgttaaaaagattgcatttcatgaaccaccaattaatacatttttaccagacagtacttattggaaagataaaaatgatgacattgtgcatcaaattttaacagaaggcttagaaaaaggtatgaaaacatttggtgaaacattaaatatcgcaccaattgatgcaaaaatgatgtctcaacctgctgatactgaagaaggacgtatagaacagtacaaacgtacgatgttctggtcaaaatttgaaattagacaatatacgcattcagatattactttggatgatttcacaaaatacagcgataaaatcaccttactaaatgggacagattctagaggctccttcccacaagatgttaacttttatataaataaagaaactggcatacctattgtagatattccaggcggtcacttaggttatattcaaaaacctgaaggctttgctgatgtattattaaatatgtggggttaattgatcgttctctaataaaacagcttggacagttttcaaattatatttgatggctgaccaagcttatttttatttacgcttaaacgttcaaatcaactcgttattatacatgaaggcatgttaaccattctcttccactgaaaacactactgttccaaacattgatagtcttcttttgaaataccctttccgataagcaccaaatattctggcactttttttgaaaatgctacaggtgttaattcatattgtccttgtgtaaattgaatgagatacgtatgtgcggtgtcttcaaatgtcataaaccctttcaacctataaatatgagtcggaaggcatgctaaacgttttataaactgtgctttagtacatttggctggtgattgcacaaattgatgatttattgttttgtgtaatgattcatgtttattgtcagaagttgctgtcatttggctaactgatattggcaaagtgacgctgccatgcataccaacttgtatatcggcctctgggttaataacttctaaatctttcaatagtttgctcgtcgtttcaacatctgctgaatctattttattaacaaataagacagaacaatatgctaattgctcataaaataagccttggatgtcttttggaaatgattttatgtgtttatacatgcttgcatctacaacaccaatcatatgtgtaattgttgtaaacggagctaaaatgggcgttaaacaagcatctaagacagagactggttctgcaatcccactacattcaataaatacaatgtctggttgctcttttaaatataattgatgtaactgttctgatacatctgctttcattgcacaacagatacacccctctgtcagttcacttaaaggtatgtcttcagatactaaggcaccatcaacactcattttgccaaattcattcatgataactgccggtttcagcgactcctttaatgattcagcgagcaaatgatttaagacagtcgttttaccgccacctaaaaacccacctataataactattttcatctgcgactctcctcttatacttcatatgaatagcatattccaagatagctttcctattgactgacatgactctatattcagttatagttcatttcttttttaaataatcagcattactattttaacaatgatgcctacaccaataactaaagacaatgatgtcaccatttgctttccaattaattttagtgctgactgaccacctaaatgtttcaaaagcatcgtcattgtgaccgagcacgctgtaaatgttgaactaaaaaacacaagtagtagtaactgtgttgctgtcattccttgtaataaggcgccttgatgcaaattaaacaagagcatgccgtcttttcgaatcattgaaaataaaatccctggtgacaattctgacgagatgcctaataacgataatataggtgtaaatatttgtgataaaacattcaaaattggcgttagtgataaaatactaacaataagacagattgtgataaaaataggtagcgcttgaacgataaacatttgtatattttgccacatttgtagcaacatttgacgtatatttggcatatgtaattgcctatcataaggtagcggaacgctaagttgttgatcattctttttcaaccatatcctattatgtaagatgccacctaaaagtactaatattaagtacggcataaatagccatgactttccagctacactaaaaatagataatgtcgcacctatttgataactacaagaactaccaaagcttattaaactcatacactgtgtcttcgtgcaggtatggcattggtgtgctgcttgtgaaatagctgctgcattacatccaaatccttctaatagtggcacgatatcattaccttgtaatcctatccgtaacattgaaggttcaattgcccatatcatccatgatttaaatcctgtttgatcaattacagcagttgataagctaatcaatattacgaccggcaatgcccatacgagcgaatatgttccaagtgatagcacaccataatcaccaaataatatatgctgtaatatatcgtgattgagcaatgttgtttgagttaaatattctatccatgctgatacatactgattttgaaaccaatctgaaaattgataagcgataccgattggcaatgcaaacattaaaaatatcaacaaccaggctaaaaatgtcgcacttattttaggtcttaaatgtcgtcgttcatgttgaaatagtgtcaattgttctatcacatgttcgctcgctataggcgaagaaactacactttctgccaatgaaatatctaatttctgttttatgattaataatcttaatttcgctttttctgttgcggtaagtttatccgcatggctaataaccaaataatgaggttcattaggtatgggcgtataatgccccgttctcatatcatatttcacttctaacatgtgcatgacacttcacaacatgaataatcatctaaatacatttgatttttttggtaattttcaatgacttcttgtttagctggtaagccttcccgctgtgttaaaagatgtgcaagtactgcaaatcgcgctctgaatttatagatatagcataatttggcattatcattttcaactgttgcaccaatcataaaaatattcggataacgtgtcgattcatcatgtgttgttaatttaatatcttgatttgttgtcgcaaataattgttgaacgattggattttttgttgcatcaaagccagttgctactattggttcatgaggcgtaagcacactttgtccgctatcaaaactgatatgatactgtccatcgttaaaatcaatatctttaactgtataatgcacattcatttcaatgcgagctccttgcttaatgacattacctagtcgctgacgtgtataaggtgacaatctaacactaggatcagcatccggatcatttaaaccggttgtgctagtataaagtgcgatgtcagagccattttttgcaagttgatatgcagcatcaaagccactttcattacctccgataaccacatattgccccttattaaagttatcaaagtcttcaatttcactataatgaataccatatttaaatggctttttagggaaattataatcacctgttgcgacaaagatataatccgcgtgatatgtctctgttgtcgttgcaatcgtataatatgcatcatctacagatatatttgtgacaactgtattttcaaagatattcagctcgtaatggttggcaaccacttgtaaatattcagcatatgtttctccggaaatatgttcttcattaaaagtaaatgctggtgaagtatccatggaaattgcattcatatcaggcatgccaaatccattagacgtaaatgatggcgtaatcgtacgggtcgatttcggccaatgtttaaatgaatgtcctactgttcctttttctaaaataatgacatctgttataccgaaatcttttaaggtaatggccatacctatacctgcagcaccggcaccgataatagccactttatgatgttgcatattaacactccctcaatgatctatttcaagttattgtttttgattataaatcgtaataattacgatttataaagtatagacctatccttgagaaatttcaatattaaaagaaaaacttccgctattgtagagaattcatctacatttcggaagttggtatgtgtcttttttattaaatttaaggatgcaacggttagttcaaatgattatgaatgacatttcatggtatcatccagcctcagtacttggagataacattttggcggtgagacagaaatgatatttttacaaaatttatttcggcgtccctccaataaatataaagtatttctttattgtggcgtaacttctccacgttgtatttcactatccaaattttgtttcatattatcaaacaactcttgaaatctaacctcatcttgatcagaataacctttaaaaataactgaatctatattttcttcgttaaaataataaatttcatcttccacaacaccaatcggatatttacatgcagaatagtcaaacatatacttttgattttcaatttctacaattggtcctctattaataatcattaacttttgcgaaccttcttttaaataaataatgcttcctattgtttccatttattttcctcctttgtcaccatctcgatttcgatatttcttcgcatttccaagtcaatcatctcttcttccgctttacgaatgtcatgttgaatttgctgttgctgctcgtataacgcttccgttgaacgtcgtttcgcaaaatgaaattcatcgcggaactgttccatacgactagccatattgctactataataacgctcacctaaatgttgatataattgttctatcgaatgattaagcgcatcgctttcatctatcaatgctttaacctcttgcttttcatcatataagtcatccatttgcttatgtttcgctgtgatcatcttattgattccatcaagtttattcgacatcatttcaccacgttttaatttttaccaatttcattaccaatcattacgtcagtttggtcaaaagcctcaccaactttttgtatattatcgctcgcagttcgtattgcttcagcaacagattgattcttactaatcaaatcatctatcacactatgagcattattatttccacttactgttgtactttcatctttatccggtttcgacacattattacatgtttcaacagcgcttttaatagatgatgatgcactattagtcttaaaaatatcactttgaactgtactcatcatttacacctcttcccatttaaattattttaaaattattagaaactgtatcaatatatgatattcaaacattcaattatacttaaatattgttttgtgattatattcaaaattattgtatcaataaatatgtatcattcctagaattttattgaacaaaaagttagaaaatcacttttattgcaactcaatcttgttttgtattatagaaattaacaatagagattaaaattttattttccaacaataaaaaagcacaaatatttttattgaggcagctgaaggccttctcattataaaattatctgtgcatattattatcttaatctaacgtaataactaatctgttgtatcttgtaaaatcttatccatagaatgcgtaacactatcacggtacatctccccaaatttcaataaatgtaccatcaataaatataaacgataaaattcaagtctataggatgcaccttttgcgagtggataatgtttattatacgcatcataaaattcgctcgtaaaaccaccaaataccgttgtaataccgatatcaaattctctgtcaccatataatggtgctggatcaaataacgccggacgaccatcttgtaagaacatataattgccaccccataggtcaccatgtaataaagatggtttactttgatgcttttctaattccgccacaatttgacgtcgcactttgtcatatactttgatatcgttggcatcccatagccctctatttagcaactcatctttcaaatgatccatgcgcttgtcgacaaaaatggtacaccaatcgtcttgccaatgattatcaaaagaaatatcgccaccttcataaggtaatgagaagccaaatttgccttcttcttgttgctgactgtgtaattgagctacgagttgccctaattggcgttgactccctgaagccccttcttctaaatacgtcatcactaaatacgcatcaccgttaacctcgccacttgcaattactctaggtgccgtgatacctgcacgttcaaattcatttaaacctgcaatttctgcagcataaaatgattctttacgtccacgttggacaagtaagaaaaatgtatccgtatccgtttcgactcgatatgcttcgtttacatcgccaccactcactggtgaaatctctttaatatcttttaaaggtaaatgctctaaccattgttcattcatacaaacaccttccattacgcttactttatactattatattgcctaattaggatgatttaatctcaattttatttgtggtacttgcgtcaattttcaaaactttttagttttaactaggaaattatgtagggaaatgctagtctattaaaagaatatatttcacatatattaagttgaggatagtaagcctcaaatataatgaaataggagcatactcatgtacaaattaattaaacctttcttattcaaaatcgaacccgaaaaagcacacggactaactatcgatgcattaaaaacgttacaaaaatttccagttttattcccagtcgtcgataaactatttacttataagaatccaacgttatcacaaacgatacaaggtaatacgtacgacaatccaattggcttagcagctggtttcgacaaatcttgcgaagtaccaaaagcattggaacaccttggattcggtgctttagaattaggtggtatcacacctaaacctcaaccgggtaaccctcaaccacgcatgttcagattattagaagatgatgccttgataaatcgtatgggcttcaataatattggtatgaacaaagcactcagtcatttgcgtaaaaatgcttatcaagtacctgttggtatcaatgttggtgtgaataaaatgacaccttatgaagcgcgttatcaagattatataaaagtcattgatacgtttaaacacgacgtttcatttttcacagtcaatatcagttctccaaatactgaaaaccttcaaaatttccatgataaagatgaattttcaatgttatgtcaagctttgacaacatttaaaaaacagcacgatgtaacagtgccaatttacttaaaactaacgtctgatatggatttcgatggcttaaaagcactattaccagcgattactgagacatttgacggtatcatcttagcaaacacaacgcgacaacgagatggtttaacttctgctaataaagtcgaagaaggcggtttgagtggtcgtccattatttgaacgtaatttaaaattgattaagtatgcttatcagcaaacaaatggtgaatttttaattataggtacaggcggcgtattcagtactgaagatgcaatcaaaatgatgcgtcacggtgcgtcacttattcaaatttattcatcacttgttattgaaggcccaggtttaactaagaaaatgaacaaaggcatcacacgttacttaaaagatcatcattttgacaatgtcagtgatattataggactagatgcctaatccaacgtagtcaaataacactttaaaacttgctgaatcgtcttattaaaattatgatataactcaagaagatatatttatcaccatttttcaaaataatggcttaaatatcacatatcattaaatatagcgttttataacggaggcgtttgttatgactaaagaaacagataataaaaaaacagtagcgacttctgacaacaaagacacacagcaacaaaatcaacctgaagaagatgaacgtcaaggtttgaatggttatcgtaaaacagatcttgatttagaaatcgagcaagagctacgtgaaatgatgaaaacaggagaaaatgaaacgaaaaatgactacaaaaagtttaaagtgttttcacttatttcaacacttatcattgtcattttagcaattataagatttgttcataaaatgatgtaattagagtgagacattgttttatgtctcagaatccagttattcatgatagctacaatatttacgatgatataaataacccgagattttagtatgattcatttcactaaagtctcgggtttctatttgataatttttaatagggcatggcttgtatatgcgcctgccttttatcttatttccaatgattaatctggatattgttctaaaaatgctttcgcttctttattaactgttttaaaatcaataccttgttgcatcgctgcaaagacacatccacaataacactgcctaaagatattatagtcattacacatttctatggaacgctcataacctttacttttcttaaaatcacttggcaaatagttcacatcgtatattttttggacatccataccaagttcattgattaattgtgcgttctttttaggtgataacgtgattgcactgccaaaataatcatagccatgttctacagctgctttcgctacaatatccaaacgcatttcaaaacaagcggtacaacgtaagccgccttctttttcatcagctaattctttatccttcaccattttcacaaacttatgcggttcataaggtgcttcaatatacttcacattcgcaccagtcttgcgattaaaatcttccacaaattgttcttgcactttagcacgtcgtaaatattcatttttcggatgaatatttgaattcgcgaaataaattgcaatgtctgcatattgtgttaaaaactctaatgtatatgtactacaaggtgcacaacaactatgcaataagattttaggtctgattgcttctctttcccactgcccgattaatttcttcaacaccttgtcataattaattttttgatttttcattttactgataataggttcagcattaatcatgatttaacctcccacatttaatcattaacttctattatatatgattcatattaaatgtcagtcaaaaaagttagaaattcattttaatgcatttatattttgaaaatcccttatgtatctaaaagcattttttaaacttgaattttaaaacactaaacaacacatacgtctctgtgtcattttcattttttgtatgtcatatatatatgtttacttcatttaaatcaatttcatcttacaatttatcgtgtattttacaaaagattgacttcaattcatcgtaaaagttatacttttgccattttttaatgtaatatagtgttagtaataaaaataatacattgaggtgttttacatgacagcattattcccttatatcgcttttgaaaattcaaaagaagcccttgcatattacgaagaagtatttggtgcaactgacgttaaacgtttagaagttggcgaagaacaagcgtcacattttggtatgactaaggaagatgcacaagaagcaactatgcatgctgagtttgaagtgcttggtgtaaaagtgctatgttctgattcttttggtcgcgctgacaaaattaataatggcatatcattattaattgattatgatgttaacaataaggaagatgctgataaagttgaagcattctatgagcaaattaaagatcattcttcaattgaaatagaattaccgtttgctgaccaattctggggtggcaaaatgggcatctttaccgataaatacggtgttcgttggatgttacatggtcaagactatactgcaatccaacaataacgttattgataaagatatcatttaataagcttatgttatttagcaaggcaagccactcttaattcatggcttgcctttttttattgtatatttttaattatcgttgctggcccttgattgacaatcgtattaaaatgccttattaagtcaactttgtctatacggtttggatcttctacccaatgtcttatcaaagacaatcccgcacctgaaacataactcatgaaataggaaaatggtataccattaatttgatcattttcatttttataacgttgcaaatgacacataattaaatcataaagtttttcgtggatatttgaatctttacccatacgaaacatcaattgataaaatgcgatgtctttttctatcatttctattaaaacggtcataatttgatgtatgttatccgtggataacttaactgctccatttaacttctcatcatgaatgaagtctcttatttcctccaactgctggtcctctaatttttcaagcaaatcatacttatcataataatgcgtataaaatgtactacggttaacatcagctaaatctgcaatttgttgcacagtaatctcttctaattggtgttgatgtaaaagttcaataaatgcatttctcattgcaacttgtgattttctaatacgtcgatctatagtcatttgtatcaagtcctccccaatgattataaacaattataaatgttatgttcattatcctacaaatctccaacattgatgattggcacacaatgtttacctgtttaatataggtgatacaaacaaacagaaaaaggtgataacaatgaaccaacatttactaggaaatccaaaattaactgtaactcatgtcaatgaagtgaaagccggtattaaccacatcgttgtcgacagtgttcaatatggaaatcaagaaatgattatggaaaaagatgtcactgtggaaatgcgcgatggcgaaaaattatatattaatattttcagaccaaataaagatggcaaattccctgtagttatgtctgcagatacttacggtaaagataataagcctaaaatcacaaatatgggtgccctttggccaacattaggcgccattccgacatctagttttacacctgaagaatcaccagacccaggattttgggtgccaaatgattatgttgtagttaaagttgcattacgcggtagtgacaaatcaaaaggcgtcttatctccatggtcaaaaagagaagcggaagattattacgaagtgattgagtgggcagcaaatcagtcatggagtaatggaaacatcgggacaaatggcgtttcttatcttgcggtgactcaatggtgggtcgcatcattaaatccaccacatttaaaagcaatgattccttgggaaggcttaaatgatatgtatagagaagtagcctttcacggaggtataacggatactggcttttatcgtttctggactcaaggtatttttgcgagatggacagataatccaaatatcgaagatttgattcaagcacaacaagaacaccctttgttcgatgatttttggaaacagcgtcaagtgccattatcacaaattaaaacacctctactaacatgtgctagttggtctacacaaggtttgcacaaccgtggctcttttgaaggatttaaacatgcagcatcagaagaaaaatggctatatgtgcatggacgtaaagagtgggaaagttactatgctagagaaaatctcgaacgccaaaaatcattctttgatttttaccttaaagaagaaaataacgattggaaagatacgcctcatgtcatttatgaagttagagatcaattttataaaggcgaattcaaatcagcgtcagcgttccctttacctaacacagaatatacaccattgtatttgaatgctgaaaatcacacattgaatcatgcaaagatcagtagcgcgcatgtcgcacaatatgactctgaagataaacgacaagatgtaagttttaaatatacgtttgacaaagatactgagttagttggaaacatgaacttaaaactatgggtaagcactacagactcagacgatatggatttatttgcaggtattaaaaagttagatcgtcgtggtaatgaagttaacttccctgattttaatcatattgaaaatggtcaagtagctactggttggttacgcgtatcacatcgtgaattagatcaagaaaaatccacaatcgcgcaaccttggcataaacatgaaacagaattaaagttgtcacaagatgagattgtacctgttgaaatcgaattgttaccttcaggcacgctatttaaacaaggcgaaacattggaagttgttgtaaaaggtagtgaaattgtaattggtaatagtacccctggcatgaaaacacgttatgaacatgaagaaaccgtaaataaaggcatgcacatgatttatactggtagtaaatatgattcacaattaatcattcctatcgttaattgatatgcaacaattacggtcgattttgattaaaagtgacatagtgataggactgtataacaagagaaagccacacgcttggaatcttaaaccaaggtgtggccctttttattattgatggctatttaattttataacactatcgtattttctttttcatgaatcatttcaataatgacattgtcttcattcattactgctactttaggtgcatggtttttaatttcttcttcattcaactgtgcataagtcatgattatgactacatcgcctacttcaacaagtcttgacgctgcaccgtttaaacaaattttaccactacctctttcaccagctattacgtatgtttcaaaacgtgcaccattattattattcacgatggctactttttcatttggcaagatgtctaccgcttccaatatatctgaatcaatcgtaatgctacctacataatttaaatttgactcagtcactcttgctctatgaattttagcattcatcattgttcttatcactttattcagctccaattattatattatctattaaacgcgcttttgaaaatttgacagctaacgagataaatatgcgtccagttatttcgtgttgttctactaattgaggataactataaacagcaacttcttcaatgcgtccacttatatgtgattcaagatattgagtaaccttgtctataattactttactttgacgttcaccgtcttgatacaacgcttgtgctaatagcaaacttttacttaaatgtaccgcttcttgtcgttcttgctccgttaaataaacatttcttgaacttttcgccaaaccatctgcttctcgaacgatatcaataccaataatttcaacggcatgattgaagtcttttaccatttgctcgacaatagccaattgctgggcatcttttttaccaaaataagcataatccggcataacaatattaaatagcttattaactactgttaccaccccatcaaaatgccctggacgcttcgctccttctaacacatcagctaatggacctactttgacatcaatacctaattcacctggatacatatcttctactgcaggatgaaaaacaatgtccgcccctacttctgatactaattctaaatctttatcaatttgtctcggataagcatcgaaatcttcgtttggaccaaattgtaatggattaacaaatacactcacaactgtaatatcatttgtactaactgattcgcgtaccatcgttaaatgtccatcatgtaaggcacccattgttgggataaaaccaatcgttgtgcctgagcgtttggctgctttaacaatgtgttgcatctcttttaccgtagtaatcagcttagtcattgttattaacctcattcataattttctttttatacgtatattcttctgatggaaatgcaccagatttaacttcttgatcgtattgctttaaaccatccacaccaacactaaaatcagcaaattgcttcacaaatttcgctttatgttcaataccataatttaacatatcgtgataaaccaatacttgaccatctgtaccttttcctgcaccaataccaatgactggaattgttaagtgcttgctaatttcctctgctaaatcatttggaattgcttcaagtactaacgcaactgcaccagctttttctacatttttcgcatctaaaataagttgctccgctgcttctttcgttgcaccttgtaatttataccccataacgccaacactttgaggtgttaatcctaaatgtgcaacaacaggaataccaattgccgttgctttttcaataaatggtgtaatatgcgctccttctgctttaattgcatttgcattcgtctcctgataaagctttagagcatgatttaagtcttgtgtcatagagatgcctactgcaccaatcggcatatcaacaactacaaatgtatttggtgcgcctcttcttactgcacgaccgtgatgaatcatatctgctaacgtcacttgtacggtactttcataacctaatacagtcataccaagtgaatccccaacaagaatcatatcaatacccgctgcttccacttgtttagcacttggaaaatcataagctgttaccatagaaattttagtttgcttttgtttcatatctattaattgacttactgttttcaatgttattcaacctctttttgcagtattattagaaatagtataatgaatcttttatagaaaggaaagaagaagatgttatcagttgcgattatcggcccaggcgctgtcggtacaactattgtctatgaattacaacaatcattgcctcatacaacgcttatcgggagacacgccaaaacaataacatattatactgtaccacatgcacctgcacaagatattgttgtaaaaggttatgaagatgtcacaaacacatttgatgttattattattgcagtcaaaacacatcaacttgatgcagttattcctcatttaactcatcttgcacatgaggacacgctcatcattttagcccaaaatggttatggtcaactcgaacatattccatttaaaaacgtatgccaagcagttgtctatataagtggtcaaaagaaaggcgatgttgttacgcacttcagagattatcaattacgtatacaagataatgcattaactcgacaatttagagatttggtccaagacagtcaaatcgacattgtactagaagcaaatattcaacaagctatttggtataaattgttagttaacttgggcattaattctatcacagcactcggtagacagacagttgcaatcatgcataatcctgaaatacgtacactgtgtagacagctattactagatggttgtcgtgttgcacaggcagaggggttaaacttttcagaacaaactgtcgatactattatgactatatatcaaggttatcccgatgaaatgggaacgagcatgtattacgacattgtgcatcagcaacctcttgaagtcgaagcgattcaaggctttatttatcgacgtgcacgtgaacacaatcttgacaccccatatcttgatactatttatagctttttacgcgcgtatcaacaaaatatgtaagcacatatataatataaaaagaccttaacgatgcatttagaaccacctgttcctaatatcgctaaggtcttttaattatattagactattcagcttctctaatttcttctgccacatctttatagtctattttcgctttaacaaacgtctcgttatttaccgggaaatgttgctggaatgtttcaaagttttgtatctcaacgacaacgtcatccacttcaaagtcaagaacatgtccaccataagctctttcatcatccgcaaaatgtatatgaaaaccagcagaccctacgccatgaaataattctggtgtaaaaaatccaacaatggcaccacgaatatcttgtcttttttcctcaggttgtctgcgtgctgaatcaatcaaacgtgtatatggcggttgctgagcaggcatcattcgtacatgcatatgtttaaatgtgccataaattttaacagccgaaaataaattctcacttaacatttcatttttaatttgtgcgaatacatcatcttgtgataattgttgcaatggaaatgtcttactcgctttaaaattagtaatcgatgcatacggtactttctcatcgccttttaattctataaattctttatgctcgttagcatgatatgccttcccatctaaaaatattacttcgccatcagaccctgttaacgttgcaatccctaaatttccatgttctaacaattcattaattgtagctgttccttctagtaagccagccattaacgtacctaatgtaccatgttgatacaagacattcgtcattccaaaaccatctccctatagttattcctcgttgtcatgctctacttcgtgattaatgcagaactactttcctttatactcaatgacgcctcgacatttctattcatgtcactaaattttcacgagtcataatactttattcaattattattttacgcaaaagtattccctctatcaatgcttgctaaaaaaatagatctatcagtgccacatgttaccgcaacactaatagatcctcttaccattaatatatttctaattaatacttaaaataggcttagtcttctaataaatatttaattgaatcgaaagtatcttctaatgttttaactgatttgtcgaataatgcttgttcttctgcacttaatggcatttcataaattttaactgcgccatgttggttaaccaatgtcggtacacctaagtaaacgcctttgtgaccgccatattgaccatctaattgtatagaaacatttaagacattattttcattatttaaaatggcttttgaaatgcgcatcaatgctaatgcaataccatagtatgttgaccctttagcttggataatttcataagcagcgtcacgtgtatttacataaatttcttccgctttagcttcgctaccagtttgttcttttaatgtgtcatatactgaaatacctgctacatttgcttgtgaccaaactgcaagttcagtatcaccatgctcaccaataatactagcgtcaacacttgaaggtgcaacaccaagttcttggctaattaaatattgtaaacgtgcactgtccaatacagtacctgaaccgataacacgctctgctggcaatccagtatattcttttacaaatcttgttaaaatgtctacagggtttgccgcgattaagaaatatccatcaaagccgctatccattacactcttaacaatgctcttcataatcttagtatttttttcaactaattgtaaacgagtttcacctggcttttgaggtgcaccagctgtaataacaactaaatctgcatctttacagtcttcgtattcacctgctttcacatcaactggtgaaggactgtggactgtaccatggtttaaatcttgaacatctgcttttactttgtcttttgcaatgtcaataattacaaattcatcagcaacaccttgcgtaaccattgcaaaggcatagcttgatcctacagatccatctccgattaatacaacctttttaccaaatgttttcataattatgtctcctaacctaattgaatttattttacacgtgactacacgtaaaaatatctatactgaaattaaagattaacaattttattttattataatattatgctaccaaattacaaacataaaactgagatgtaagcggagtcaaattacactctaacgccaataaatattgatatctcaagctttagcacgtaatttgaaatttgtgacaatttttagcattctaaaattgcgtaatgacgctatttaaaggctttaacaaactattgagctttctatttttttcattttaaaaaggatggctattcgacttaaatgacttactatataacctcctatttttcgccttactctcatcatatttgatgcacctttttatagtcaaagaattacatttcatacaaactaggcaatcagacataaacatgaaattgattttaaaaatataatgcgcaaaattgttagaaaattagcaaaaatagtacttattcatttaatatctgttataatcagttttatcatttaaaaaatctatggatgttatcaagacaagtcattaataagtaacataaagttgtgatttttcagaatttttagacaaaatattgattatttgtgctatgatataacatattaaaaaacaccgtatagaattgtttatgaaggtttgggaggaaagtttatgggaagttttttcaataaaatagcacgaaaagaggatccggctatctatcaaaataaagatggtcatttaaagcgtacacttcgggtgcgtgatttcttagctttaggtgtaggaacaattgtatcgacatctatctttacgctacctggcattgttgctgcagaacatgcaggaccggccgttgcgttatcattcttactcgctgctattgttgctggtttagttgcatttacttatgcagaaatggctgccgctatgccatttgcaggttcagcctattcttgggtcaatgtattatttggtgaattctttggatgggttgccggttgggctttattagctgaatattttatcgccgtagcctttgttgcatcaggattctcagcgaatttacgcggacttgtgaaaccaattggcatcgaattacctgcagcattatcaaatccatttggtacaaatggcggttttatcgatattattgctgctatcgttattttattaactgcattattactatcacgtggtatgtcggaagcagcacgtatggaaaacattttagttattttaaaagtattagctattattttatttgtaatcgtaggtttaacagcaataaatgttagtaactatgtgccatttattccagaacacaaagtaactgctacaggtgactttggtggatggcaaggcatatatgctggtgtttcaatgattttcttagcgtatatcggtttcgattctatcgcagcaaactcagcagaagcacttgaccctcaaaagacaatgcctagaggtattcttggttctttaagtattgctatcgtattatttattgctgtagcacttgtgttagttggtatgttccattactcacaatacgcaaacaatgctgaacctgttggttgggctttacgtcaaagtggtcatggtgttgtagcagctattgttcaagctatctctgttatcggtatgtttacagcattaattggtatgatgttagcaggctcacgtttactttattcatttggacgtgacggcttattaccttcatggttaagccacttaaacgacaaacatttacctaatcgtgcactagttatacttactattattggtgttttaattggttctatgttcccattcgcatttttagcacaattaatttcagccggtacacttgttgcatttatgttcgtttcattagcaatgtatcgtttgagaaagcgtgaaggtaaagatttaccaattcctgcgtttaaattacctttatatcctgtgttaccagcagttacatttgttttagtattgctagtattctggggattaggattcgaagcgaaattatacactttaatttggtttattgttggtatcattctatatttaagttatggacttagacattctaagaaaaatgacgtagctgaataccacccaccaaaataaaaattaaaaaaatcatttcccatctgattaacatccagatgtggaaatgattttttattttatattaagataatcgctattaccaaccttgtccagatatgtcatattgatctaagtttcctgcttccaaagcagtcagtgcatcttctatagtgtttaacgccgtgtctaattgctcatatgttattaccaatggcggttggaatcgcaacacatttcctgctacagctataataactacgccatgctcaaagcagtaattacaaattttaagtgccgcactggcatcacgtgttttgaggtttttgtcggaaacaatatcaataccaatgctcaggcctttacctctaacatcgcctacactattgtatttagatacccattgatccattcgtttcctaacatattcccctttttccgcactagcctgaagaagcgactgatcttcaatcatttgaattgtggctaatgcagcttcacaactaactggattagcacctgttgtaaataaatgtgctggtgcttctaaacaattcataatctctttgcgtccaacaattgctgacataggcataccacctgctaaagattttccgaaagtgattaaatcaggcgtaaaattaaaatgcgagactgaactccatgtacctgttctcccaaaaccttgttgaatatcatcgacagcgattaaaataccattttcacgacaaatattttctaacgcttcaaaataccctggaactggttctaaaagtccaccatcgccttgtatcgtttcaataacaatacatgctacttcgtcagcaggtacatatttcgcaaacatttcttttaagggtgctaaatattcttctactgaattagcttgtggctgctcgtacataccacgatatttatctggaaacggaatatgataaaagccattcaataacggaccataatgtttgcgcatatttaaactaatagctgacatagacaacgagccaaaagttgaaccatgatatgcattagtgaaactaatgatataaggacgccctgtatatgctctggcaaatttaatgatgccatcatttgcgtctgatccagttaatccgaaggtcactcttttttcaaaatctccaggtgcaatctcacaaagcttcttagctaaacgtaccaacggttcatgatacatatatgctggtgtataatgaataaatttatcaacttgtgcctttatcgcttctgttacttctctaggtgcatgacctacgttttgagaactcgcactcgataacaaatcgatatatgtctttccctcaatatcaaccaatgttgctccatatccatgatcaataactaacggataatatttaatacgtcctgatttcgcaaaataatgttcatcctcttgaattaattgatgtgctttactcatatacattcccctcccattgacagaccttattcacataattaccttccctacatcgataaccacattcgatttgatatcacgtgaaaatactgtcatgtcattatgaatactatccaatatactaataaaattcagatttgtaaatatattctgataattaagaattttatatcaatctactttatttatgcgcataattttgttcgattagggaattgtttactatattccatttgactctgaggtgatatgaatgcgtttaaaggtattgttccatttcattgctgctattttcatatcattcatgttgctatggatgaccatgttgtttgacataataagcaatcaatcacatttaaaagctttgttattgaatttagattttctaattccttctgacaatacaccatatactctagaaataatatgtcacttactaattggtagcgtcatttattttgtatttgtgttgctgtttcatacttctaaaaggctttactatctatgttatatccctttagttttcttatttatagcattgtatccctttttagtatttattgcgcaacgtccaatttttcaatttagtgtgacagaattaatcggttggattattacacatattttcttcatgtcattaatggcgttagtcatacctagaataaaataatatttttaattaaactgacaattatttttcacattttataaacttttcaaggtttatgacttgagaaatgttctcatttttatcatactggaggtgtattgaaaagttaaggagtggaaagtatgaataaagagcaattagaaaaaatgaaaaatggaaaaggctttattgccgcattagaccaaagtggtggtagtacaccaaaagcacttaaagaatatggtgtaaacgaagatcaatatagcaatgaagacgaaatgttccaacttgttcacgatatgcgtacacgtgtggtaacttcaccttcattctcaccagataaaattttaggtgctattcttttcgaacaaacaatggatcgcgaagtagaaggcaaatacactgcagattacttagctgacaaaggtgttgttccgttcttaaaagtagacaaaggtcttgctgaagagcaaaatggtgttcaattaatgaaaccaatcgacaacttagatagcttattagatcgtgcaaacgagcgtcacatttttggtacaaaaatgcgttctaatattttagaattaaatgaacaaggtatcaaagacgttgttgaacaacaatttgaagtcgctaaacaaattattgctaaagggttagtgccaattatcgaaccagaagttaatattaacgcaaaagataaagctgaaattgaaaaagtattaaaagctgagcttaaaaaaggtttagacagcttaaatgctgatcaattagttatgttaaaattaacaattcctactgaagctaacttatacaaagacttagctgagcatccaaacgttgttcgtatcgttgtattatcaggtggttacagcagagaaaaagctaatgaattacttaaagataacgctgaacttatcgcaagcttctcacgcgcattagctagtgatttaagagctggacaatctaaagaagaattcgataaagcattaggtgacgctgtagaatcaatctacgacgcatctgtaaacaaaaactaatttatacattaaacgtattttttgatataaactactaaaaaggactcatacatgtgctttaaacgcattgtgtatgagtctttttgattaaagttgattttgccgtatgtattagattacgtaaaaaaatcggacagctgaaaaatctttaagatttctcagttgtccgattttaaatataactattagaatttagttttcgtagtaacctaattctaagtcttttgaagtttgtttacggatttttctcattaatttttcgtcttcaattaatgattcaccgtatgatggaatcattttcttgattttaggtgcccattcagttttgtattcagggaagttacgttctaatacttctaacgcaactgaaactgaagttgaagcccctggtgattcacctaataatgcgattacagtgtggtcttgtgagttaaccacttctgtaccgaattggatgaatcctttaccgtgttcaggtgtatctttgataacttgtacacgtttaccagcagtgtataattgccaatcttcattacgtgcttctggatagaaagtacgtaagtggttcatacaaccttcttttgtcataatcacttgatcaaatgagtatttaattaaaggtaagtttttaacagctgctgctaataaagttgtaatgttgtatgttttaactgatttgaataaatctaagttagaaccatttttcaagaatttaggtccaacattagcaaatggtccaaataataatgttctttgaccatcaatgtaacgcgtatctaaatgaggtacagtcattggtggtgtaccaggtggctctttaccataaactttggcatcgtgttgttcaataacttgtgggtttgtacaagctaagaattgaccactgatagggaatccacctaaatgtttactttcagggatacctgttttttgtaataatggaattgctccaccgccagcaccgatgaatacatagtcagttacttgtttgaatttctcaccagttaggcgatttttaacagtaacttcccattgaccatttgataattgttcaaaatcaacaacctcatggttaaattgcacagtagcatttggatgtgcttcaatgcttttagccattttacgtgttaattcaccgaagtttacatctgtaccttcgtcaattttacttgccgccatgataccagggttatcttcacggcctttcatcatcaatggaatccattttttcattacttcgatgtcttcagtatattcgatattatcgaacatagggaaagctttcatcgcttcgtaacgatcttttaagaatttaacattgtttttacctctaacataactgatgtgtggtaatggattgataaattctcttgggttctcgatgctaccgcttttcactaagtgaccccagaattgttttgaaatctcaaactcttcgttaatcactttcgctttttcgatgtcgatagaaccatcaggttgtaaaactgtgtagttcaactcacataatgctgcatgacccgtaccagcattatttctttcgtttgaactttcgattgcaggacgatccaagcgttcgtaaacgtggatattccagtctggctcaatttcttttaacattgaaccaaatgttgtgctaagtacaccggctccaattaaaacgatgtctttactattagacttagccattggtttcacctctccaaaaattgtaaatgtgtatcatcaatatgaaagttacataaaactgacatatttctttaaaatatcaacgccatagataacttcctgttttaattgatacgctgtaacaaaatactatagttagtgcttacatgtatatgttaaagcaagcagtggtaaatgtaaattataattattcattaactttgcaatatattaaatcttttattcatagaagataaatatcaaatcaatcataattatttgacaacaaatagctaacgattgttttaatctacatttggcttatagcattttaaacctatactctattttgatacaatataagtgtaaaatcaatcataaaaaggagattcaatgcctatgcatccaagaaaatcacttcaattacctttaatattgtaaattattttgaatcttgcacttataggcattgtgattatcgttttaacacatactgagtttcaacttaatgccggtgatagtaatgtttttttattaaactgggatattcgaggtttaacatcttatattttctcattcttaatactggttgcgcttgtttctaaactaattttaatatttataactagacgacaaagaacatcataaataaacaagcagtccagtgcgtatcatcataccttacgcattggactgctttgctatgtttattgattgctatctttttgttgttgccatttttctatttcagcatctcgtagttcaacacgacgaattttacctgagtttgtttttggtaagtcgtcaacgaattcaatctctcttggatatttatatggtgcaacttcatttttaacaaattgttgtagttctttaactagcgtatcatcacccgcagtatggtcctgtaaaataacgaatgctttaacaatatttcctcgtatatcatgaggttttgctactacagcacattctttaacggctggatgattcgttaacgcatcttcaacttcaaaaggcccaatcgtatagcctgaactaataataatgtcatctcgacgtccttcaaaccagaaataaccatcatcatctacatgagctaagtcaccagtgatgtagtatttacctgtttgcgctttcgccgtacgttctggctctttataatatcctttgaaaagtgctggcaaatcaagtggtactgcaatattccctttcgtattagcaggtacgctattcccctcatcatctactacagtgaccgaactacccggaatgcctttacccattgatccaatcctttgtggtgtatcttttaaaaagcctataagcaaggtactttcagtctggccatatccatctcttacagttaaattaaagtatttcttgaattgttcaactacttctcgatttagtggctcacctgcagaaacggcactatgtaaatgcgttaagtcataatcatttaagttctgtaatttagccatcatacgatattctgtcggtgtacaacataaaacattaatttgatatttttgaagcaattctaagtatgtctcagggctgaatcttccattaaatacaaaagcagttgcacctgaacctaatacagataagaaaggactccatacccatttttgccaacctggtgctgctgttgcccaaactaagtcatcttcattaatacataaccaatgttttggtgccatttgtaaatgtgcaaatccccatccatgacaatgtgtaacggctttaggattgccagttgtaccagatgtatatgacagaatcgccatatcatcacgcgtcgtatctgccatttctagtttgttacttgcgttttctttttcagcttcaagtgaaatccatccatctttttgaccggcaataacaaatttagttaacgcatcatattctttaattttttcaaattcaactgtgaatggctctagtgcaataacagcatttatttcaccgtgtgtgatacggtattgtaaatctttagttcttagcatttcagaacatggaatgattgcaacacctaattttaaagcagcaatatataattcatatgtcgcaatagatcgtggcatcataatgagtactttatcgcctttagataaaccgtgcgatgctaaaacattacctactttattagactgttcaatgagctgttggtaagtgactgatatatcttcgccttcagtattatgatataaaattgcctttttatctggtatgtggctatatttttcgatttccgaaataatgttatatttttcaggcgcgaatagagctgacttttgcataactaacttcctttcatacatccacttttcctgtgatgaacattgtaattttataaatgaattatatatatcatacgcctatctttacagaattttcaattaaatagggttaaataccaaagtcctcgacactacgctttgacatgacatagcattcaaggactttcaaatgattgagggttgatatctcgggctagagcatatcagctaattcaatacgaatattgtatgataattcacgattaattatttttacatctgcacctttcgaagtgccacgatgcttgtgtgtatgcttgtactcagctgaattttgccaatgataaaatgcttgcctattttcccacagcgtaataatgatatagtgtctaccagctgttctaggtcttaaaaaccttaatgctttaaacccatcaacgttttgcaaatgcttattacgttgcaaaaatttttgctcgaatgtttcttcttgtccttcgttaatatataaatgatttaacacacataatgtatcatttgataaatcatttatcgcttctagcacatcgtaatatgcagtgtcattatttttttgtattgtgagacaatcatccagttcttctattacataacttctatattcatcataaatgttcataataaatgccttcatttcatttatatttttggtcatattactttatatctattactaattcattcccgtatttattaattacaatcatagtttgacttctttttaaaagataaggctttgtaaaaagtattaatattccatacaaatggggacaggcgtcgcccattatttttgtgtcttcaattccatgatcattatttaacattagtcatgaaaatagccgacaacttcatctatgaaattaccggccttgtattttagctaactttatctctaattttacgattttaattgatcatacagagaaagtgatctttttacaatttctaaaaactcatgatctatattggacatttgatgaaaataagacaaaatgttttctgttagcttctcttgttttgggaatgaatcatcttctttaatccaaatcgctaattcgcctaatggtgttttatcatctttaaatgtttgtatatattcgtaaaagctcatagtattccttctctcaatttacttatataaatcctaccacgaaagctttcaagaaaacacaattaaatgtctatttagtgaactttttaaggttgtacactcttttaatgtctgtcaattaggtcaattaatcatcacaatgtacaattaactctattttcagttcatattctcacacaccgtttttgaacaacacattaacttctcatttagataaaacgcaaaaaagcctggcaccaatacaatagatgccagactaaaagtctactatatcaatttatttagcgtatggttttacttcgattgcaccttcattttcatcatgaacaccatgcttataataatcaatatattgtggctctaaaggctttctgccacgtataatgtctgctgctttttcagctaacattaaaacaggtgcgtgtatattgccatttgtcgtacgtggcatagctgatgcatcaactacacgtaaattttccataccatgaactttcattgttaacgggtcaactactgccattggatctgaagcaggacccattttagcactacaagatgggtgtaatgctgtttcaccatctctacgaacccaatcaagaatttcttcgtctgtttgcacttctggtcctggtgaaatttctccaccattgaatggatccattgctttttgagataagatatttcttgctacacgaattgcttctacccattcttttttatcttcttctgttgataaataattaaagcggatacttggtttttcgaatggatctttagatttgattttcaagctgccacgagagtttgaatacattggtcctacgtgaacttgatagccatgtgcgaccgctgccttttgaccatcatatcttacagctattggtaagaaatggaacattaagttaggataatcaacttcgttatttgaacgtacaaatccgccaccttcaaaatggttagatgctgctgcaccagtacgtgtgaaaatccattgtaaaccaataaatggcatgcgcttgatatctaagcttggctgtaatgatacaggttccttacacttatgttgaatgtatacctctaagtgatcttcaaagttttcacccacaccaggcaaatgaacacgtggctcaatgccttttgattttaggaattctgaatcgccgataccagacagttgtagtaattgtggcgtattgaatgccccacctgacaagatgacttcattagcatcgatggtatgtagtttgccatttttcttatacgtaacaccagttgctcttctaccttcataatgaatttcagtaacaaaggcacgtgtttcaacggttaagtttttacgcttcatagctggatgtaaatatgctcttgaagctgacattcggcgaccacgatgtacttgactatcgaacggtccaaaaccttcttgtctaaatccattcacatcaggtgttttatgatagcctgcttcaacacctgcatcaaagaatgactggaataaaggattcgttgctggccctcgttttaacttaattggtccatcatggcctctaaatttatcataaggcgctgcaccgtatgttttttctaattttttaaaatacggtaaacagtgcgcaaaatcccaagtttccataccttctggttctgcccagccttcatagtccattggattaccgcgttgataaatcatgccattaatcgaacttgatccacctaaaactttacctcgggcatgtgctactttacgaccgcccatatgtggttcttcatctgttgaataaatccaatcgtaaaatttattgcctgaagggaacattaacgcagcaggcatttggataaataaatcccaaaaataatcactgcgacccgcttctaatactaagacttctttatctttatcttcactcagacgattacctagtacagaacctgcactgcctcctccaatgatgacataatcatatgatttatttttgttactcatcgttatgacctccaaagtttgttgtatttcaaagtgagtattgcatgaaatatttgttagtggctgattggttatcgttgaattgctaaacttagctaaccaaaacactcgattttccttttatgattgttactaacagtcatgaaataatctatgattcattttgcgtttagtccaaattatcaatcaacatttcgccacttatacaaaacaaagtgagtgtcttgtgttcttacaatggcactcaccttatctaatttttatttgctaaaccaattcactaattgtggatttgtatttgttaaaatgtgttttgaaacaaggtactcttctaagccttctttgcctaattctctaccgatacctgattgtttgtatccaccccatggcgcttgtgcaaaatatgggtggaaatcattaatccacaccgttccaagtttcaacttgttagcaacgcgttgtgcttttccaatatctttagaaaatacagcacctgctaaaccatatatagaatcattcgctaattgaatcgcttcttgttcagtttcaaagccttctacagtaacgacaggtccgaaaacctcttcttgtacaatacgcattgacgtatcacaatttgtaatgactgttggctcgaagaatagaccatcttttaaatcgtctctatctgggcgtttaccaccaacagcaattgttgcgccttctgctttagctacatccatataagattcgattttattacgatgttctgttgaaatcactggtcccatttcagtatcagcatcaaaaccattacctaatttgatttttttcacgcgatcaataagtgcttgctcaaatttgtctttaatactgttttgtactaatattcttgatcctgctgaacaaacttgacctgcatggaaatatccaccatttaacgcttggtctaccgccaattcaaaatcagcatcatcaaagataatgtttggatttttaccgccaagttccaaggcaatattcgtaacattattagcagcatttttcataatatgcttaccagtctcaatgccacctgtaaatgatactaggtcaatctctttatgacctgacattacgtcaccaacttcagaacctgcaccaagaataagattaattgttcctttagggaaaccaacttcttccattaattcaaaaacacgtattgttgttaatggtgtaatttcacttggtttcataactagtgaacaacccgtagcaagcgctggcgcaattttccatgatgcttgtaataacggataattccaaggtgtaatttgtgtaactacacctactggttctttaacaattttgctttctgtatctggtattggtgaatcaatcatttcgccaccatctttatctgctaatccagcaaaatacataaacacattatgaatatcatccatatctgcatatgattcttctaacgtttttccagtatctaatgtttctaatcgtgctaacgcttcgcgatgttctttgatcttgtccgcgatggcacgtacttttttacctcttgtttcagcagtttcttgcgaccattcaccagactcaaacgcacgtcttgcagctaagattgcacgttctgcatcctcttttgtcccttcagaaaccgtaaatatcacttcttgattgtaaggattgataatatctcttgtatttttattcgcgctttcaacccactcaccatcaatatattgacgctgagataaatgttttaaaagttccattcaacaacctccgttaagtttgttaaatttttatttaacgaattttacaaacttatgttagcatagaaatgaaaaatgtgtcaatttacaaaacaactcaagaattaagttttgtaagttcgttagatttttatttaacgaaacatttaactttaatgctttaaatatttttaatgtctttttttagaaaaggttttataatgtattagtatttattttaacgtgaccaaaatgatgtacggaggtgcaatgatgactcgttctcagaacaaacagcaacaattagaacaagcaaaagatattgtaattaattcaattggacagacaatggatttgtatggcactaatagaagtgtaggaaacttatatggcactatggtgtttgaaggcagtatgacgcttgatgaaatgcgtcatcaattgcaaatgagcaaaccaagtatgagtgctggcgttaagaaattgcaggaatttgatattgttaaacaacaatttacgagaggaagccgcaaacaacattttatcgccgagaaagactttttcatctttttccgaaactttttcactaaaaaatttcagcgtgaaattgatatcaatgtcgaagcagtaaaagatgctcaagctattatcaatccattacttgaaagcagtgatttaactgaagctgaaacacaagaggcacacaaaattaaagctcagcttgatcatacacatgtttattacgaatggttagaacagttaaccgaagcgattgaaagcggtgaaatttttaaatatttcccaattccagaacagtcttctgattctaaaaattaaaattgactcaaacaacgacaatgatgattatgcatgatgaaaacaatgcaataggtccacgaaataaacggtaatttctatctcaataaatagaaattaccgtttttgcttaatatcacgattaatcatatacttataaaattcaaaatcttatgcatcattaattgaattataaattatcgtcttgttcttcttctgatacttgaacgattcgcaatgagcgacgttcaacttcttttaatttttcagcccgcgtttcaagtttaattctatcgcgtcctaaaatgattaaaaatgatatcatcatgaaaataaaaataacaattaatggcacacttgccagtattgatgcagttttcaatacttctaatgcacgttcaccaccaactagcatcaatgaaaatggcaataagcacaatgcaaacgcccagaataaacgattggcacgtaatggttcgcctaccacttttttctgagatgctgccgctaaaatatatgaacccgaatcaaatgttgttgctaagaataagaaagcagatactaagaatagtacaatcatcaatgatgggaatggtaaatgatgcaccacttcaataatggttgcctctgtaccatgtgtatttaaatattgtgttacattaaactgtccagaaatttgtaaatacacagcatagttaccaaaaataccaaagaataatacgcatccaagcgttccataaataattgttcctagcacgacttctttaaggcgtcgaccttttgaaattctagcgataaataaaccgataaatggcgcatatactaaccaccatgaccagtagaatattgtccagtcttgtgggaaattcgtttcttttcgacctttaataccaccgaatggttctaaccatgttgccatatggaagaaatctctcaacatatttccgaaccctgtcactgtcgtttccataataaaaacagtcggtccaataataaatataaaggctaaaagtacaaatgatagccaaacgttgatatcacttaacttttgaataccttttttcaatcctgtatatgaactaatggcaaatataaccgtgattgttaataaaatggccgaacgtaaaatcatatttttaccatctaaaccagttaatctttctatgcctgcagaaattaatggcacacctaacgctagtgatgttgccgcaccacctagcaatccaaagataaataagatatctacaactttacctacaaatttatctgtttgaccttttaaaatcgggcgacaagcttgactaattttatacaccggttgttttttaacaaacactaaataaccaattggtaatgctggtaaaacgtaaatagcccaagcaattggtccccagtggaacataccatattgcgtcgcatattggagtgcttcatcactcatacttttcgcgccatttggtggaacttgatagtaaaaagcccattcaataacgccccagtataaaatatcagagcctatgcctgcacaaaacagcattgccgcccatgtaaatgtattaaattctggtttatcacttgctttaccaagtgtgacattaccatatttaccaaatgcgatatacattacaaagcaaaaaatcgccagccccataaataaatatatcgaaccaattgaatcagaaatggcactattaataccagtgatgatatcttcacttgcttttggaaaagccatcataggtataactgcaaaaagaagtacagctactgtccctataaaggtcgtccagtccataactttctcttttttcaattgtgctccccctaattattaattttatgaatcctgtttcgatttatctcaaaatgtaataattatattgattcacaaaattgacaataactaatatttaataataatgcaaatttcatacaatttgaaagttggcaattattgaatatttatataatttttctcgtaataaacaaaactttaatagcgctaaaacaactgtgttaagttatgatttaacgaatttaacaaattttactaggatggcatttaagaatatttatacgttattaacgaatatttatttattgtaaaacgctaccaaaaagttagacttccttcccactaaagtaccacttttctctttcaactttttttaaaatgtatatgcaacttttagtattagtatcaaaatgattgttaggtcatattctatcaatatgtttttctaaagaattgcttttatcaactttcaattatgtgcctaacctaaaaagaagccaaggcaacggatgttaccttgacttctaatacatattcaactaacaatatattcaatcatacgcgcatgcgagagtgattgttgtacatctataatgcgttgatttaaagaacctttatatggtaaatcaggtttgaataagtgttgtataaatagcccatctactaaaacgtcaatgtatgataataactctcgacgttctgtacaatcatttgctaaatattcatataaaaatccagtccatacccaaattgtctttgtatttccaaaacgtgctcgaaatgctttgacaagatttaatgtaatatccaaattacaaaatggttcgccacctaatagacttagcccagatatataatcatgatcgcaatcatctaatatttctgctaatattttatcagtgtatttctcgccatatctgaacttttgtgaggctttgttgtaacatccaacacaattaaatggacatcctgatacataaacactgcatcttactccttcaccgtcaacaaagctatttgattctattttagcaatataaccttgcccttgtttaatgtctaaaagtgtcattctttaggcgctttcatatgttttactcgtgcgcaaatttctttatgacggcctttaattactggacgttgaactggattgcctaagtaaccacatgttcgtttaacgacatcaactgttttaggattatcattgccacagttcgggcatttaaatcctttttcagtagcttcaaaatctccatcgtaatcacattcataacaatgatcaatcggaatatttgtacctaagtaaccaactttgtcataagagtagtcccatactgcttctagtgctttcaaattgtgttgcagtttcggatactcacaatagtgaatgaaaccaccactcgtataataaggataatctttttcaaaatctaacttttcaaaaggtgtaacatctttacgtacatcataatggaaagagttttggtaatatcctttatctgtaatgtctttaatatctccaaatctctcttggtctaaacgacaaaaacgatccgttagcgattcactcggcgtactgtaaatactgaaccaaatgtcatataattctgtccatttcgtttgataacgtttcatttctttaagaatttcaagcgtaaatgcttttgcttcttgagatgtttcccagtttggaccatagaaaacagtagctgtttcatacaaccctatatagcccattgaaatcgttgcacgtttatttttaaataactcagcaacatcatctgtttcttttaatttatagttaaaagcgccacttttatataaaattggtgcgttattcggtacagcatctttcaaacgatttatacgataaagtaatgcatcatgtaacacatcgatacgttcataaaagatttcccagaatttcgtcatattaccggcagattctaatgccattctaggtaaattaagtgtaacaacaccaagattacaacgaccattattttcaaaatgaccttccgcatctttccaacttggtaaaaatgaacgacaacccattggcgctttgaaatcacctaatatttctacgagtttgtcataatttaaaatatctggatacatacgtttcgttgaacactttaatgctaattgtttaatgtcatagttcggatcttgcggactaaagttggttccttttttaattgaaaatacaagtttcgggaaaatcgctgtcgtgcggtcttttcctaagcctttgatacgagtatttaagatagcttgttgaattttgcgacttaaatgatctgtacctaagccgaatcctaatgttacaaaaggtgtctgtccattagatgtatataaggtattaatttcatattctaaactttcaatcgcatcattgatgtctttagtgacttgttgatcaacataacgatcaatttcagattctttgacaaattgctttgcgatattcctatgttgttcttcattatgtcgtgcatatgtactaagtaattcgtcaacgcggtcaaccgtacagccaccatattgactgctagaaacattggctataatttgtacaagctgcgctgatgcagtttgtattgattttggtgaagttacattcgcgttgcctatttcaaatccattatgtagcatatttttagcatctattaaacaacagtttgttaatggttggaatggatgataatctaagtcgtgaaaatgtatgtcccctctttgatgtgcatctgcaacatgctttggtaataaatgatttaatgcgtaagatttagaaacgatacctgctgttaaatctctcattgttgaaaatgtatcactatctttgttggcattttcgttaacaatagcaggatctttagaaatcaaacccgttaatgcttcttcgatttgattcattttaccccttcttcctatatattgtgtctactcattacgttataccactatatatagtattttcaaatttttattagtctgttaactaaaacgtcacaaagttattaacatttagtgaaattcatatttctacacaattatttcattaatttttaaaattgttctcgaatcgttccgtcatttcgacatctttatgcaactattatttcattttgtaacgggagcatagtttctattttttcatacttaaatcgtcacaattcccatcaacattgcaattactaacataacgatggcgaatccccaaatccaaaagaatgcatacttaatatacgtgcccatgtttgcctctgctaaaccaattgccaaccataaggctggtgaaaacggactgacaaatgtacctataatattccctatgaccattgaataagcagttgatacagatggtacaccaaattgccctgctgtttgttcgacgatcggtaacacagcaaaataataagcgtctgtgctagttaataaatctaatggtacgccaagtaaacctacaataatatgcaagtatggtcctacttctgcaggaatcactttgattaaattcgtcgcaatcgctttaagcataccggtttcatttagtacacctaaaaacatacctgctgcaataatcactgcagccatcattaatgcattcggcgcatgcgctcttaatcgctccatttgttcatccactgatttaaaattaataacaagcgccaatgagacacctatcatgaatgcaaattcaggtggcgcaatatttattaacatcgctagaataacagctaaagttaaagctgtattcacccattttatccatggttttgttcgtgcacgtccttttacaggaaaccttacatcttgatctcgttcatatacttcaactaatttatgtacatctatatcttgtgtttgcggtaattcatttctctctattgcttttttaatacgcttttgttctttaaatccaagataaaccgcaaataacataacaagaatgaaacctattatttgaataggtattaatccaaaccataattcattgacacttttagcttttaaaacagcagctacccgcgccatcggacctccccaaggtaccatgttcataatcgccgcgcttaatgctaatagtagaatcaataaatatttattcatatttaacgctttatataaaggtaataaggcaggaatagaaagcaaaaatgttaccgcaccggcaccatctaattgggctattgtgccaattaaagctgtcattgcacagacaataatgacattgcctcgtgtcattaatattaagcgtttgacaagcggcttgaataaaccactatcgttcatgatgccaaagaaaataatggcaaagataaacataataacaacgttgatgacttgatctaaccctttagcaaaaaatccaaccaaatctgtcacactatatcctaaaatcattgcccctaagcaaggtatgattgtcatacctacaactggatttatctttttggcaatgagtaaacctacaattgaaataataataatgagccccattactgttaaccacatattatcactattcatattattttctccctccacttttaatacaatttacataatccccctctttaacttaaatataataattaatataattttttatatttaagttaactcattttatcaaaaatttcttttttgtgtaactatcaatagtgaagtttgattttcctacttgataacatggcatgactaatccttgtatatcctgtcctgtatttcattttgatttatcatttttattattgctttctattgcacaaaaaatctggctaaaggtcgctatgatagtcacgacttcaaccagatttcaatttatccatctattttattaagtttgttctacgtattttttctctattgtaatattcatatttaaaacgcatatcattatcgcttaaatccttcattattagactattcacaaagccacccatgtcttaatttcaatgattaagcgttaaagttaaaataagaagacttaccttagacggttagacggcccgctattattgtcttacatccaaccacgctaaaaattgagcttgtttgtcatgatttaaatattcttgtgacacaatttgtgacagtaactgttgcttttcgttatatgttatatctagtaactttattttctgtcggcaagtatataaaaagtcgatatacgaactatatgatggtggatataacgcctcaagctctgccataatcgattttgtcaacttaggacttgcgccatctgtagatacactaatagttagcttgtctcggtgtagtgcacttggaaatacaacattgccatttgatgcatctccaacattattaaaaagggcatgctcaggtaaggcttgttttaccgcttcattgacacgtggctcattggttgctgcaataactagatacgcgtctacaatatcgcttggttcaaactcttttcccttccatatgacgacacctttatctaccatattttgaagtttttcagtgattgtcggactgatgaccgtcatatgttcaacgtattgacttaatgtttgtgcccgacgacttgcaactgtacccccacctactataaccacgttcttatttgttaaatctatcatcaatggcatactcatattgcgctacatcctttatatctttttacgtcatttcaccttaaaacatttaacacattgaagcattaataaacatcgcgttgataacgttgtcgctgtttcatttgacgcaatatcgtctcagcttcttcttgagaaatatgacgttcttttaccaatacatctttaatggcttgatggacatctttcgccatacatttttcatcgccacaaatatagattgctgcgccctgctcaatccattcattgaaacgttcactttcttccattatacgatgctgtacatattctttgtgttcttggtctcttgaaaatgctaaatctacgcgtgttaagtttccattttcaagccattcttctatttcttcttcatataaaaagtcagaactacggtgttgatcaccaaagaacaaccatgtttttccagtcataccaagttcttcacgttcttgtaaatatgctctaaaaggagcaataccagtacctggaccaatcataattaccggtatatcttgcttcatcggaaatttgaagttcggatttttcttcaaataaattggtactatatcgcctggtttaatacgctcagcaaaatgaaccgagcatacaccttttctctcacgtccatgtgcttgataacgaaccgtaccaacggtaatatgcacttcatctggcgttgccataaaactactagaaatcgaatactctcttggtggtaattttctaaggatttgatacatattctcaggttgtaattctatagttggaaaatctgttattaaatctataaagtcccgatttataacatattcatgcgcccatgactcatcttgaatacgttcagataattcttcattgtcaaaatagatatctgcatttttcaataatggcaatgttaatttagtaaattcaaaatgtgatgttagtgcttcagcaataggaactgtatcaccatgatcattaattggcaccggagattgcggatcccaacctaacatggatattagtttttcaaccaattcagggtcgttttgcggtaatgctactatacaatctcctggttcatatgattcactaaaatcatcaagtaaaaattctatatgtcgtgtttctttatttgaatcggtaccatttaaattgatattcgctaatacttctgcttggtatggatttgatttagaatatttcttttctttggcagacttaattgattcacttatcaccgattcactttgaataccttctgatgtggtatcaataatattaatgatgtctgccatccacttttctgcgtcttcttcataatcaatatcacaatctacacgcttacatatacgctcagcgcctagattttctagtaaagcatctacatctttaccggcttgacagaaaaattcatatgtttgatcacctaaagctagtactgaatatctcacatgatttaaattaggtgcgttatcgtcttctaaaaattcaaagaaatcccatgcattatcaggcggttctccttcaccatgagtagacgtaataataaataaatcttctaactgtgcgatgtttgtcgtatcatattcatccattgacatcaaaacaacttgatgtccaatatcacttaatcgttctgaaaaaatttcagctaaacgcatggcattacctgattcagaaccatatagcactgtgacatgccgctgattagcttcgatatgtggctctttattttgtaacatatacgttgttgaagtttcttgttcttctgatatttgtgattgttgccacacttctgtctctaattgttgttgattactatcacttgtcgtatcgttactattagctagtaaaaaaccactaagccactgttgttggctctctgttaatgtttgcagcagattgttaatctctgtgacttgtttttctgtaaatggactattagatgtatttaatttcaaatattttcacctcaataaacttgaaatagatgattgactcatttttcatcgatagttcagtcaattttttaatatgtatggtataaattaaaacaaacttgagttgtgtctgatagttatacttacaaatatttacaaccttcatgtggtttgaatgacacagtaattcagacaaaactttgattatgtcgtgtcagttattaatgcatacagtcatgcatcgttgttattttttatttatttactatttattatgtaccaaatcagcctttcagtaaaataggtcaaattactgattttctaaatataaaatgcctcctaatgacatactattagtacatcattaagaggctcttgtgttatttgcatactaagcgctcaattttaaatttaagatgaagattcttgcaataatatttctatatttgccgatatatccaatggatcttccattggcaagaatcgatttacaacattgccttgtcgatcgattataaattttgtgaaattccattttattggggacccaaagattcctggttgttcattctttaaatgcgtaaataacggatgttcatcgttcccgttcacagatattttagctagcactggaaatgtaacaccaaatttctcacgactaattttcaagatttcttcattagaacctggttgtcgattgtcaaaattattattcggaaaactcaacactacaaacccacgatccttatatttttgaaacaaagtctctagttttttcaattgttcgctatatatacattctgttgcagtattaacaactaaaatcactttacctctaaatgcttctaatttataagttaagcctttataatcacttacttcgatatcatacacatttctattattcataagacacccctacacagccttttttatattgaatatgttctttttagaatgttctgataaaataagtgcgcgtttacaccgcgaatacacattatatagcgtgatacatttttcaaacacacgataaataatgttcgagtttatgttgttgctcaacctatccgatttaccgtcttttttcacctgtcttactttattaaaataatcacattgtatagctgtattagtccagctacaatatctttcgttataacccctcattataatcatccttattttctatttttaaaaagacaattagaccgctctttaaactatagattaatacttaagttaaactcatacatactgataccatacgttaaatctaacaatttaaaattcgttataactatggattaaagagctgcccaactcatttaatccttaaaaacttcacatgtgattgtttattaagccctcctttatcttattaaatatccttataacccttttaaaattaaactgacacactcatacattgttacacgcgacgataaacgtcatattattgcatatcattaaaacaagtcactttgtatcgtgtgcgaccgaatacatattaaatcatcaataatgattattcaattattaaaaataaaaacgaacattctatatagagtttccacttattgttttttcagcattgtcttcattacttaacattcgtatttgcaagtaatattgaccaccaatatttagacactttataagtatgccattcattatttttaatcatattatttttcatattgatatttctatacatatatttctgattgtatatttagatataatcatttgttattggaaaatatatgaaataaatttgactcatctttttcaatatccaaatgacacgatgtatgatttttgaattttgtaattaatttaattttaatttcctttaaaattagactgaattgtgacaattttcaaacattttaatgtgtaaatcattggaaaatatatacgaattgcatttaaatcgtcaatttacatatatttttgcgtagtaatcaatcgttatcattgttatttatcgttacattacttcgagtatcagtatgtatttcgggcttcgtttgataacgacatttctttgtgacatcgcttcatcagtgtaactacaaatacaatgatttcgtgatgttagttacccattttatgtgttgcataaaatatgttgttataaaacattttaaatcattttatataaacaagctatatatttttgatatttcaaaaatataacttgtcatacaagtaaaaaaccgataagacattttatcttatcggttgaaaattgttattgttatttgtagtatttttaggttttctttttcatataatatatttcagtgaaaacacatgattgattgtgatttcactgaaacatggttaattgcgttgttgatgaataactttagcataaatgtaggaagttattttgtacatcgccatatatagaaacgaaattataatgacagctagtacgtaacatgttaaaaatatatgatggttattaatccctagcatatttagtaacgtataaacaatgttgctagaaattaatgtatgaatcagtgctactgttattggtattgcgaacaagaaagtcatttgatttcgtgttatctttgatattctcccattatctaaaccaagttttttcataatgtcataattgtgctgatttgcataggcttctgaaacttgcttatagtacatcattagaaatattccaatgacaagtacaattgataccacgccacctacaaatattagtccacctgtcagacgatcccaaaccattagcatttctgatttagaatttattgatgcatcgtactttttcgaaagcttttgaatttgtgatgttgttaatttcgtctttccagatacattaaagtttatcgatattgtcgacttcttttgttcatgtgcataaaatccttttactttttgtaattgattgttatctttaacaattaaaaccatactatcttgaatcatcatcaaatttaacgcatgtgcatcaagttgtttcactttaaagacttcattattaagaccgaccttagactgctttttaaaaataggtacattcgtaatcatacctatactttgattgtctaagtgtaatttgttttggtgatatcgattataatcttgcacagtaagtgctgtgatcattactgattgcttagaaaatatcgagccttcattaccaatgaagtctattggaatatcatcactagcctgttttaacttgtaataagcacgattcttttctaaagaagctctaaataatgtcgtttcatatactttgaagtcttttgcattaaccgaaccctgtatatcacgtttaatatgctcaatcgtttgttgacgttctatttgtgacttagaattgtcgttaaatgacaaatcataatcattggtaatcaacttcataatggtatgattcatatcgcgataggttgttagtgtcattgtgagcgttacaatcaaaaatgtacacagcaaagtgattgttgcaagactgactgcattcattttaagacgtacacgcatcccaactaccacaaaaaaataccgtggatgatagtaaacttttgatacctgctgcaatatactaataattatttcacttatacctacaaaaaatgcataagtaccgataataactaatcctatgacaatccatattttaaaaaaagcaccaaacgtcgtatcttgttgtaatgcaataaaatagcctaaatatagtgctgcgcttcctataacaattaaaacgtaacgcaaccatcgtgatatgacactggaatcggaacgatgttgataagttatcggtcgttgaaaattaatactgaacaagttgaatataagtagcatgcccattaatacagcaatgataatcaaagtaataaacatcgctacagtatcaaatggataataccttaacgtagcaacttcactgcccattattttctgtataaacaagaaaaatatcgcaccaagtaagtatccgccggcaatactaatgactgaaattatcataaattgtaagatagtttccatcaccacaattaaacgcatacttttcttggtcatgcccaatgtcataaaaatgctaaactcttttcgtctttgtgacatcataaagtgatttgcatagaaaataaaaataaaagttaaaagcgccataaaaaaattagctatgataataaatggtactaggaagtcattcttctgttttatgtagctatttaacccaattgatacaagcgtatattcaatcatgaatagtacacttaccgctaaaatgaatggaatgattacaagtcgctgcgtaataaattgacgtcgtactatgtgccataacaatcttaacttcatatattgacacttcctccattcacaagtgctaagctatctgttattcgctgttgaaaaactaattgactttcttcaccacgatatatttcatgatatagacgcccatctttaataaaaatgactcgctctgcataagacgcatcgatatttgaatgagttaccattaaaattgtctgttccaattgatgaatctcttgaaataacttcatcaatgcttttgatgtttttgaatccagtgcacctgtaggttcatcggctagtaaaatcgtcggtttagtaactaatgcacgtgcaatggcaatacgttgcttctgaccccctgagatttcagaaggatatttgtttaagaatccctctaaatgtaattgtactgtcaactgatgtaccctttgttctatatcttttcgtttagcaccagctaaaattaatggcatcattatattttctttattcgtcattgttggtaaaagattaaaatcttgaaaaacaaaacctaccatttgttgacgatacaatgctttacttttatttttcatattatttaaatgtgcgccatccacaataatgtcaccttcagttaatccatcaaaagaagcaattaaatttagtagtgtagacttccctgacccagactcacccataattgcaacaaattcaccagctccaactgataaattcatttgattaagtgctgtcgtagcattcaaacctttaccataaaccttttttacatgtttcacttctagcaacatggcatgcacctcatttctttgttagttctatattaaaacaaaaaaatactaataacttttaaattagtgaaaaaatgttactagtatgcttacaatattgaaagtttttattcatctggaaattgaatcgtaaatgttgtaccctcattttgtttagatacgactgaaacaggatggtttgtgtgagttgaaatttgttttacgataaataaaccaatcccacttgagttactttgccgctggccattataacctgaatagcccttatcaaatattttaggcaagtccgcttcactaataccgataccattatcttttacgtataattgattgaattgctcatcaaattcaatccatatatctttacctctcgcatacttaagtgcattatttattaattgttctatcattaaagaggtccatctaacgtcagttaatacttcgtgatgacaaggttcataatggatttttgttttttgatcaataaactgtattgaatatttcataataattgggcgaatgatattgttaatcgaaattttagtgacagaaatatcagaagtttcatttaataactttaaataactaagtgctaaacttgtatagttatcaatttgaataacctcttgacgaacacgattcacaacattaggctcatctctttcaagtaacagttgtgctgcagtaatgggtgttttcatttgatgtacccatgttaaaaagtagctctctacatcatttttatattcaatttgttcatttttaagctgatacaacgcattttctaaattttcaatttgttgttgttggcttatagtttttacaaaacttaaatatttaatacctatgaatatgagtaataataataaaataacgccaagtgctagtaaatatgcttctaatggcaaatgatacaggtaaaacattaagccaaataaagcaaaaataactatgactattgctatttcctgagtaatacttttaagaaaggtcattgcattcaccctatactttatatccgacatttttctttgtaatgataaaatcattaacgccaatagtatttaattttttacgcaggcgcgtcatgttaacagctaatgtgttatcatctatgaagttttctgattcccaacatttttcaattaaagcagttctacttacatatttatcttcattttgaaataataactttaatatttgtaattcagtcaaagatagctgtatgctttgttcttgatacacgacttttgcttcatctaatattaatgtacaacctttaaccgtcaatgaatcattagctactgacaagtcataagttcgtctcaataatgcttgaattttggcaatcgttaatgacaagttaaatggcttttcgataaaatcatctccccccatttgtattgccataatttggtccatattatcaatacgggaactaataaatataattggcacattagatgtttttcggatttcttgacaccaatgaaaaccatttaacgttggcaaattaatatctagcaatacaagctgaggttgatgttggttaaagatagacagtatatcatcaaattgttcaacgacaataacaccgtaattccattttttaagttcagatgctaaactttctgctataacaaaatcatcttcaacaattaatattttcatctataatcttcttccttcaattgaattatcctttgttatctttttgttctttagcctgctgcaatgacggctcttgatttgaactttccgtgtcatttgtattttgatttagtgtatttgctttttctttctcgagttgctttttcttcgtacgtttacgctcttctaaaatagacaacactataaagaatatgattaataatggagataacattactagtatcatttttccacctcaaattatatttaattctatattttcacacgcttctattctaacgctttctataacaaattgtcatatatattcattttttgttattctaaatcactctgtttacatatttttaactaaaactacataattgctcaaaattcctcttttacactgaagacatagtcatatactcaggaggatgtcttatgttatcagttaaaaaagccacaaaatttgcagttgctaaccttattatcgtgtcaacagtttttagctctgtcacacctgcaattgcgcaatccgataaaagttctaaagatgaaagtttcgcggttggtaatactaaaaatccaaaaaatgttatctttttagttggcgatggcatgggtccatcatttaacacagcttatcgttattataaaaatgatcctcatgctaaagaaatgacccctactgcttttgattcatatttaaaaggcacaaatcgtacatattcaaatgacccaaaacagaatattactgattctgcagctggcggaacagcctttagttctggtcataagacatataatggtgccatcggtgttgacagtaacaagcagaaagtaaagacggtgcttgaacgtgcaaaagaaaaaggtaagtcgactggtcttgtttcaacagctgaattaacagatgcaacaccagcagcatatgctgcacacgtgacttctagagatgataaaaacgaaatcgctaaacaattttataaagataaaatcaacggaaagcataaagttgatgttttattaggcggtggcgctaaatatttcggtaaaagtaatggcaatttagataaaaaattcaaaaaagatggttacgaccttgccacgaacagtaaggagttatcaaaatctgataaagataaagtgcttggtttgtttgcagataaaaatatgccacttgcaatagatgcttctaaagacgaaccatcattagctgatatgcaacaaagtgcacttagtaagcttgagcgtaataaaaaaggtttctttttaatggtcgaaggtgcttctatagataaatcagcgcattctaacgatattacaggagtcatgtctgaaatggaaggttttgaaaaagcattcgatgacgccattcaatatgctaagaaacataaagatacacttgtcgttgcaacagcagatcactctactggtggtctaacaattggtaaagataaaggatacgaatggaatcctcaaccgattaaatcgatgaaacactctgcatcatatatgacagaaaaaatggctaaaggtgaagaccctgaaaaagttattaatgaaggttatggctttgaattttcacaagatgatatgaaaaaagttaaaaaagagaataaaaagctaaaaagactacttaaaaaagaaaaagatgaaaaatctgcagatgtagaaaaacaaacaaaagccttacaacacgcaattcagaagccagtaaatgataaatcttatacaggatggacttccgatggacatacaggcgaagatgttaatacttacgcttatggacctagatcagaatcatttagtggtaatatcgaaaatacagaaagcgcaaaaataatatttgatatattcaagtaaagcataaaaaaattcccgagcactataacaagatgttcgggaattttttatggtttaatttagtactcaatgttaggtgcttggttaacacgttcttggtattttttaaatgcgaagtataaaccgccaactaatgttaaaataactgctaattttttcatcattcaaactcctttctaagatgtgttgaaactgagttcaattaaattatatgtttttattatacactttttgacatattttttaaatttaagaatgcgaagattttcaacatttctgatgctagctttctttttcatctttcaaatgcttaataaaatcaaagccaggtcgccctttagccaatgcttccatcacatcataccaatccgaaccgacttgttgatatatattttgcaataattcatcttgcgccttgttcaattcagcaatgagttgatcgcctttatccgtcgaatataattttttgacacgtcgatcagtctctaaaactttttcaataatgagaccttgctcttttaatttttgaagtgttgcatgtgatccttgtttagaaatttctaatatttctagtaatgatttaatagtaataccaggtaatttattgataaaaaacaaaaaacgatgatgctgacggctcataccatacttctctataatttcatcagcggtagtaataaacgttttatatgcaaaataaaacaacatatgctcataatcgtttttattggtcgacatgatgatgactcctttcaaagcgttaacctcattataataaaatttataatgtaagtcatacaaatgatgataaaactataagctaaatctaagtttcacgagaaacatttttgtgtatcagcaaattgcaccaatcatattaatacaaaattaatttaaacactcagaaatgttagtcgtgcgtaaatagtttgtatcactcactctgtgtatttaatgtaggcacatattttccaggaaataattaatcattcaccatccatgttatagcacgcttaatcgcttggtcccaatatgcataatcatgatctcctggtccatcttcaaattgataaggaacatttttgcgtgataaataatcgataaaatctaaattgtcttgatataaaaagtcttgtttaccacacataatgagcaattttggaatttgtttatcttcagctacagctttgtctagcaagtaatacggatcatgttcagttcctttaacacttgaaagattgccaattatggcctcttttgaaaaatcattccactctagatccattaaattttgcgcttcaaacacagcagataatggtacagctttggcaaatttatccccttgtgttaatgcaaatttaattgtgccatatcctcccatagagtgacctgctataaaattgtcatcacgttttttggaaagtggaaatatttgatgaacataatcatatacttccaaaatataatcataatagctatgaccatatgccatgttagcatatgcgctatgatccacattgggcataatcacagctaatttgtgttcattcgcatacctttctatgcttgtatatctcatatatgtcgtttcatcacttgataatccatgtaacaacattaaagtttttaatggtttagcagttgtatcgttattaaagaagctttgatcttccggtaaaatgactgtcaaattttgatgcataccaattgttggtgaatgatagtttaatgaaatataagccatacgtcatgacccctttctaattctactttatcaacattttacgcttaaacaattcactttaaaatcattttcaacaaaaaaaccgaatacaaatgtattcggcctaaaaaagtatttacgctttttctttatgatcttgcttgcgttttctaaacaatagtaatgatcctaataatgccaccattgcatcaaataaagttgcatttgtgttttcgctcttatctcctgtttctggtaaagcatcagtttggtgttgttttgatgccttattagaatggtttacttcacctttaggatttgatggtgctttttgttcattatttggtggtgtaactcttgaatcggagtcgctatctgagtccgaatcgctgtctgaatctgactcactgtctgaatctgactcactgtctgagtctgaatcgctgtctgaatctgagtcactgtctgagtctgagtcactgtctgattctgaatcgctatctgaatctgactcactgtctgattctgaatcgctatctgaatcggagtcactgtctgagtccgaatcgctgtctgaatccgagtcgctatctgaatccgagtcactgtctgaatccgaatcgctgtctgattctgaatcgctgtctgaatctgaatcgctatctgaatccgaatcgctgtctgaatctgagtcactatctgagtccgagtcactatctgaatccgagtcgctatctgaatccgaatcgctgtctgaatctgactcactgtctgaacctgagtcactgtctgaatccgaatcgctatctgagtccgagtcgctatctgagtccgagtcactgtctgaatctgactcactgtctgagtttgagtcactatctgagtccgagtcactatctgagtccgagtcactgtctgagtccgaatcgctgtttgaatccgagtcgctatctgaatctgactcactgtctgagtccgaatcgctgtctgaatctgaatcgctatctgaatctgagtcactatctgagtccgagtcactgtctgaatctgactcactgtctgagtttgagtcactatctgagtctgagtcactatctgaatccgaatcgctatctgaacctgagtcgctgtctgagcctgagtcactatctgaatccgaatccggatctggttctggacttggctctggatctggcgttggttccggttctggctctggacttggctctggatccggcgttggctccggttctggctctgggtcaactggtggtcccggtgttggatcaactggatttactgctgaatcaccatcagcacttccgcctccataacgtacaacattctcattattccaaccgaaaatactgtagtctttacctgtcgctgggtcaatattttcttgaataacctgtgttttcaagtttttaccagtattatcatagtgaccttccactaatacaacatacgttttatttatatcaccaaaattaatacttgctacgttatcgtatttgtatgaaattttatctttaaactcaccagtcacttctttaaggttagagtcatttgggtctgcatagtagctatctgataatttagatgtatcattcacttcaaaaattctcagttttgtatctgtagcacttactttaccgctactttcttcgattttatcttggtaacctttaatatacacccacgtattacctaaaactcgttgcttagggttaacaaataccgtttgcttgtatgtgttttgacctgaagctgtatctacaccaataatttgagaagaaatgttcgcgccatttggcttatcaattcctgcaattggcgaactatagttataagtaattttattatcaaacatttcatccgcaatattaatatttgcatcatatgttcctgatttaggtgcctttgctcggtctgtaaataaaggtaatgaaaattgtccgttaatattttctttatcatttacataatctgtaaagacaaatgtatacgtcttagtcaagatatcatatgttgctttagctacaacatcgccattcgtacttttaatgtctgcaattggcatcgtattatttgaattagagtaatccacgtctccattaccagttacactatctggtaacttcgctgtaaaataatcccctgatttcacttgtccagtcactttaaaatttgccgccataaatgtgttaccactttggttagggtcaaatgcagtcttttctaacttgaaatcacttgccgtaactttatcatttacatttgtacctttagcatcagcagcatttactacaggttcagcaactgcaagactacgtacagctctcgttctaacacttggtttactagttccttgcgcattggaaatcgtttgtggtgatgattgtggtaaatctaatgtttgaggatttttaagctcactgtttgttgctatgttattagcatcattcgttgttttattatctacttgagaatttgcttcttgaggaacagtttgatcttgcatttttgcagcagttgcttgatctttaattgccgtcggttgaggtgtttcatttgttgaagctggctctgttgtagtggtattgctcgtttgtgtagacattgtttttgctgtgctatctacattcgcactgtttgtgtttgcactaatatcagatgtatcattagccgttgtatttaattgaggtgtttctatcgtattgtttttttcggaatctgcacttgcattatttttcgaagattgcgttgtatcgttcgattgttctgaagcttgtgcttgatgattgcctatcccaaatagtatagttgcccctactattactgatgtggtacctactgtaaaacgtctaatcgaatacttattctgcttattcgacaaataatcaattctttttttcaaaaatattactccatttcaatttctagattagtctaaattgtataatgaaataagaattatatcaattgcttttcgaaaaaaattacgtaaaatttgttttcttcctatttatataacttaaaattttctgttaactagcaaaaatcaatatactatttttacactattacaaatgttttacttttcaaaaacttagaagttctaaatttttcatcaccttaaattttactgtaatttcaacaatcaaatttaactaacatattaaattaatcatcatgctaacaaaaaaggcctaacgtataaatgtacgttagacctcatgttcaacttattcattttacattgtatattaaacacatacatcattgaataaatgtttgcttactaaccaatttttatgatctttaacaacaagtttttcatctttaagttcatgaataatatgaccagctgtttcccgggaaatcccagccatatcactcatgagttgaatagttaaaaactgtttgatttcataaaattcatcttgatcgtatcctactgtctgacatagatggcataacaatttgataattcgatctttagcaaatttacttgttaatgccatgttatagttcatgtgttgctgctcattatcatttattaatgcaaaaagtgtcaaaaatatatcatcattagctttgcacaaaaaggccatcaattctctaggcaatccaagaactgtacaatcggttaatgctgtgcacaattcgttaacctctttcggatgaaataagttactgattggaaataatacttgctctttattaaaataacgatatacatctccattttgattgtaatgttctctaataatgttaccttcaattaaaaagtaaatattgctactttcttgtggcgaaaaataaataacttggcctttcgtataatgtctgacaaaacattcactttgatatggttgtaatatactatatgggatattaatgtaatctgctaatgcctttagttcatgttctaatttattatttctacccaaaataaagttttctgtcataagttaaactccttcaaaccttgcaaagtgtcagcagacaactttttcatttgaatcaacggagaaacatatttaatgttttgtcgcgtgataaagtgctacatgtgaatgtgtgtacctttattaccaatcaaagcttcgtatgcctgctctaaattggtaatgataacttttttgttttccccactttcaacaaatcgtatcgcagcttctatttttggcaacatcgatccttccgcaaacttaccttgtgccgcgtattttttcagtgttgctacatcaatatcatcgatttgttgttgattaggttcattaaagttaataaatacattttctacattcgtaagaatcattaaggtatctgcttcaatcagcgttgctaatttctcactagcaaaatctttatctataaccgcttcaacaccttcataggtattttctttttttataactggaataccgccaccaccgcatgcaatgacaatatttttaccgtctgctaaagttcgaattaactggtgttctagtatagattgaggtagtggtgacgcaactacttttctataaccacgtcctgcatcttctttaaagactgagcctggctgttctttttgtaattcttcaacttcttctttcgtataaaaaggaccaattggtttagttgggttatcaaatcgtggatcatctttatctacttccacacgtgttacgattgtgcctacagttctatcactattcatttcagttaaaatgcgattgatttcagtttccaaccaatagcctatcataccttgtgacattgcaccacaagtatccaatggcattgccggcgttgtgtcactgttcgatttagcttgttggattaataaacctccaatttgtggaccattaccatgtgaaatgacaatacgcgctggtgaatcaaataaaggtttaaggttttgcatcgcacgtctaatagctgtttgttgtgcttcagctgttgcttcttttgtctgtatcgcattaccgcctaatgcaatgacaattttctctttcatatttttgtcgctccttttaaaaaacatttatcgttcccatcaataacttaattaacccgataactgcaagtacgataataatcataaaaagaatatagtctgatttaatcaaacgtgtctgattattcttttgaacgattgaataaacaagaagagctggaatataaagtaacatcgtcagtaataagtaattgatacctgctgcatatataagccatatagcataaattgaggctatgataccaatcgtccattgtttagtagttgcttgctgtcgatgctctaaagtgtatttaacttggtaaaatgcactgaacatgtaagggtataaaatagcacttgatgctagtgaaaatgcaaattgatacgcactctgtgtaaatagcatacttattaaaaataattgtactaatatattggtaataagcagtgcatttacaggtgctccatttttattttctttagcaaacctttttggaaataatccatcttttgcaacaatgaaaggtaattcaccagcaagcaatgtccatcctaaccatgcacctagtaccgaaataattaaaccaatatttacaagtgtagatccccaaccacctacaatagatgcaagcacctgtgccatacttggcgaatctaattgagaaatatgattttgcaaaatcacgccttgagctaatacagttaataagaaatagataattaaaactgatataagtcctataaccgtggcactacctacatcttttttatttttagctctgctagaaaaaattactgcaccttcgataccgataaacacccaaactgtcactagcatcgtacttttaacttggctcattgtgctcgcccaactaaatggcaatacaccctctgacgtcataccgaaaaagcctgttttaaaagtgtcaaaattgaatgcaattatcatgcatatgattacaagtaaaatcggtattaactttgcaacagtaacaatactattgataaaggctgctgtttcaacaccttttaaaattaggaaatgcacaccccagagtagtaacgaggcgacaataatacttggtaatgtgttgcctcctttaaaaatcgggaaaaagttaccaactgctgacatcaatagtgttgcataggcaacattgcctaaaaatgctgagaaccaatatccccaagcactgataaagcctacaaaatcgccaaatcctgcttgagcataactataaataccaccgtctagctccggccgttcattggttaaattttgaaatacgaacgctaatgaaatcattcctatagctgtaataatccaaccaataataatggctaatccaccggctttaccacccatatcagacattatattgaacgcaccgccaccaatcatggatcctataactagtccaattaaagaagatttactgagtttgttatctcctgattcgttcatattcatttctcctttaataccaatatgaggtgtctgtacttgatacttatatcatcagacacatcatattcatatcgttccatttagtgattaactccccaatgttgctgccattactgccttaattgtatgcattctattttcagcttgatcaaacacttttgaatgttcacttctaaagatttggtctgtaacttccatttcagctaatccatatttttcataaatttcttgtccataaagtgtatttgtatcatggaatgctggtaaacaatgtaagaatatcgttgaatctttacctgttaaatcaaacaactgttgattcacttgatagtcttttaataaattaatacgttgttcaaattcactttcttcacccatcgatacccaaacatctgtatatatagcatctgtattttcaactgcttctgcaatattatccgtaatcatgactgaaccaccatattgactcgctttttcttttgcaatatcaacatatgcatcttttggatttaatgatttaggtgtacaaattcttacattaacacctaacatagcacctgctaccattaatgaatgcgcaatattattacgtccatctccaacgtaagttaagtttattccttccagatatccaaaattctcttttattgtcataaaatcagctaacatttgtgtaggatgccaatcgtctgttaatccattccacaccggtacaccagagaacttcgctaaatcttcaacagcttgttgtgaaaaaccacggaattcaataccatcgaacattctacctaatactttcgcagtatcctctacagattcttttttgcctaattgaatatcatttttccctaaaaattctggatgcgcacctaaatcaatagacgcaactgtaaacgctgcacgcgttctcgtcgaattcttttcgaatagtagtgcaatattttttccagataagtagtgatgcttgataccatttttcttatactcttttaatgtaattgcaaaatcaataagtccttcgaattctgctttggtaaaatcactttcttttaataatgatctgccttttaaatcatacggtttttgaatttctgtcattattttcaccctcgcttctataatttattacgttaaatgtcttctctgaatagtggttgactcatacatctaggacccccacgtccacgtaccaactcgctaccagatatttcaatgacttttatacctttttgtctcaataaatcattcgatacatagtttctatcgtaagtcactacaacacctggtcttatacataatgtatttgagccatcattccattgctctctagcaccatcaatgacatcaccatttcctgttggaatgaattggatatcatctatacctagaacgtcttctaaagtatcttttaaatgactagattgtttgatggaaatatctttatttacgtcatcatattcaataataaatatattcatattgccttctgcctttaaaatggctgaatgtattgtaaatttgtcataatctatcattgtaaatactgtatctaagtgcataaatgttctactagttggaatttcaattgctactacttttttaaacgtcgcctgcggattttcaaaaatacgtcgcgctaacttttcaatagcttgtgcagatgtacgttctgaaacgcctatagccaagacttctttagataaaacaagttcatcgccgccttcaatattgaatgggcaatctcgatctaaccagattggaatattcgcatctttaaatctaggatgatgctttacaatatattgaataaatattgattctcgtcgtcgtgctctccagaacatccgattgattgttataccgtgtcctattgaggcttgtggatctctagtaaaataaaggtttggcattggatctaaatagaatggatacttatcatccatatactctactagatgtgtacatttcggattaatttcttccttacgtactcctgacattattttatctacaagttcttgattagaaagtgtcgcaaataatgccttaatttcttcttcatgacctaatattgtttttttagactctgctaatacatcatcaataaattcacttcttacttgaggattttcaatactttcagctgctaacttctcaaggtaaagtacttcaacaccctcttctcttagcacctgtgcaaaatggtcatgctctttttgagctacttctaaatatggaatatcatcaaatagtaatccatctaaataatcaggcactaaattttctaattcttttccaggacgcttaagtaacacagtttttaaagctccaatttcgctatttactttaattggaccatctgtcatgtctatttcctccttttatctttgaattcatttagagtatagacaatcttcaaacgcttacatgtgattatattcacataaagaaagtcgaaaatttcatatctttttgttatacaatacataataatggatttttatacataaataaaggtattttgggttaaaatatacattttttattcaaaaacacccacaaaaacatgttgtataaagttttttatacagtcaaatgaatgactatgaattctttctttccataaaaaaacgcgtacacaagttaatatgtagtaactaacttgtgtacacgtgatacaaaacaaatttttattattcatttgatacatgtctatttaaataattttgcatatacgtattctgccatatcatttgatgcagttaagattaatgtagtgtcatttccactcaccgtacctaatatttcttcaatatttaattgatcgataaagtagttaatgccttgagcgaaacctggtgaggttttgactataatatatgcgccattgataatcgagctaagtacttcatgttcacaataatgtttaaacttttctctcatctcttgttctgtttgattattaatagctttataaatccatgtctcacaatcgatagggacacgatatatattaagttctttcaagtctttagcaattgttgttgcactatatcttacaccaaaatattcttcaatatatgaaatgatttgttcttttttataaatcttatgctttttaactattgtagaaacaatttctaatcgtttacttttcttcatattgtaaactcctttggtagttacgtttcttgtattaaaaaataaattcatgcatgtttcatttataatttaacactttgttttgcaaaagataataaaaatacatgtaaattttttgtgacaacttttaaaatgaattttgtattctaagtcagcatttaattatcacatatttactactagtaatgattttagactgccgagtagtctttcggcagacaaccctcatactcctctcatctaattacaaaaagagggtacacctacaaagtcaattatcaatgtaggtataacccttatataagctgtatttaaaatttaattatttataagtgtttaacattacttcttcttgtttatatatttttactcgacgccaacttcgttccatgcttcatatacttgttcagctgtttgctcgtcatataaatctttagccgcttggtataatgcatctttacaatctttgaagtttgaattacttgttaagtattccgttaatgctcggtagtaaatttgttctgatttagatttccctattgcttgaattacgttataagctgctttatttggaatgccagaattcgtatgcacaccaccgttatctttttcagtgtatacatagtctttcatatgagatggttgaccaaattgttctgggtttgacatgcttcgtaaagcatctccctcttttcctggtgtgtaaacatcttcacccatcaagaaatcctcatcatctacaaagtatccaaaaacatctgaaaagctttcatttaacgcaccagattgatctttatactctaaattcgccgtttcttgtgtcacgccatgtgttaactcatgtgctactacgtcatttgcacctgataaatttgtaaacgtgcggccatcgccatcaccataaatcattttgtctccaatccatgcagcgttatttctgttatcttgtccaccataatgatttacatgtgttaatgagactattggactaccatggttatcgtaagactcacgaccaaatgtatttttgtagtaatcatatgtttgtttagcataataattcgcatctacaccagcacgttgatcatctttgacgaagttttcatcttcattagtaattaatgtcgcttgacctgtttgatcgttaaaattgtatgctgataatttaccttgatgcgtcaaatcctctaaactaaatccaccatcaatactattgatattgatatcttttgtatctccaagcacacctttacctgtgccagttgctgctgcttctttaactaagttcgttttttcaacaactgctcctgtgtctgcatcaattttaactttccaatgtgaaatttctggtgttactgtaattaattcaatattgtaaatgtatttattactgtcaccatcgatttcgactttattttctttgataacgtcatcttggaggtttttagctttatttttatcaatcttaactgcgttaaatgctttgtcagccgcttcatccttgcttaatgtcactttatttgtcggctttactttcttcgcatcagtatcaccgttgattaaaacgactttacccgatttgtccgcatgcactttcacttctttgtcaggcgcatgcacaccatccacactcggttgtaacgtgtaatgcgtgaatcctttcttatctgtttttacatctgtaacagagtaatcttgataatgatttttcacattttcagatttaggtaactcttttaatgctttaactgcatcactcttttgcgtgatttcaaaattaatatctgaagttgctggtttgtgattcgtatcactcgctagtgctgcaggtgtcaaagagctcagcaacgttactgttgccatacttgtaaatgcatatcttgaaaatttcctcacatttcattcctcctgaaattttaaaaacagcttataaataaaatattaatttaatttttcagaaaagtaaacgattatttctatttatttctatactttttgttcgttgattttatttattgattcttttcttttttaaaaatgttatctgtgactaaataaaattttgaaaattgcacttaattatcttttaaaatttatcaaggctttatttttgtgaaattattaacaatcaaaaaattagtacaacacatacttaatcaacatgtgaaatatatatgctgactacttaactgcgcatgattaaatctatatatttcaatatcatggagacacgaaaactaccatcatataatcaaaaaagactagtatgtgacatcattcctcacatactagcccctatatttactttattatttactcgttttgtatggcgtatgtcccactgtaacttcaaccactctattatgatcaacaacaaaccaaatgcctaatgcctttttagaatgttgataataaaaaataccgctatcagattctttcgttttattattctcttttttcaaatctttaccataagctttttgaatatcttttagtgatatattatttttaacgataaattgtaattgattcgcttcatttccttttgcagttacacctttaaaagtttgatcgtatttctctactttttttgtcgcatttgtcttcgctaatttaataccattaaatgtcacgttgtcatatttaatagcgttaataaaatgcttatccattataaaattagcgttatgaccgatatatccatgataagtatagtaaggtgttgttgccgcctgtgcttcttgatgtattggtgatgcagtccctacaactgttgcgccaattaaagtacctaatgctaatgtcgttgctgcacaaagtttagttgtttgattcatatttatctctcttttccatacaaatttttcaatcttattactattattataacttgcttgtacaataaaatgctatttattatatttataaatatataacagttttgttatacttatttgaagtacataaaaaactgacacaaatattaatatcgtccgcatttcaagttttatagttagcatcattttatcgacattgaaagcatgatgccatgcaatgtatgactatttttattataaacggaggcgttacatttgaaaaaatttcttattactgttgttatcatcttgttaattggtgcacttggattcgctatttatgctgcaataaatcattctacatcatcaaatcataataatgagcaagataataaagctacccatcaaaagaaagatactgaagtaaatcatcaaaaagacgagaatacaaacaacacaaatgaaaatcaaaacaacaacaacggtgttactaatggcaatcaatcatctacgccatcaactgtccaaaataacggttcaacagcaccagcgaatacacaaccatctaatccgaatcaatcaaattcaaatcaatcaaattcaaatcagggcggtagcagtcaaccttcaacgaataaccaaaatcataaacaacagaatacaccggccccaaacaaatctaataatgctaatacaaacgagtcttctaagcaggcatcaccatcacaaccgcaatcatctaaaaattaatcatttacctgatacgtccacaagtatcaggtacataaattcagaaaaacagcaatgagatatttttctatttgaaatatcttactgctgttctttatttgcataattctcactttgttaaattcatataaaagttcgctttaatgtcattgacgtatgtataagctctcatgtttaataatattaatacacatttaaaaacgcttacacgaaaaatttagaaaggaggtacatgttaaatgcttgatagacacttaaaactactccagttttttattaaaaacccatcaaagcacattagttctaatgaaattgctgaacatgtcaatgtttcaaaccgcacagttcgcaatgatatccatgttatcaatagcaattttatggatgatatcatcgtaagtattaaatctaaaggatatcaattaaatacatcgcagtataccttagaaacgataactgaacgttacacgcatattcaatcatataaagaaaaactattattatctatggcgtatcaactgctaatgcacaataaatcacagacattgcaacaactagagcaagattatctattatctaaaactgtgctcaacgactatttcgttcgaattcaacaatggtgtcaaaaatttaatatcgctttaacaattaagaaaaaacaaggtattgtggtcgatggaacagataatgatatcactaatgccatcatccatttaaatcaattatcatcagggcatgtacatgttgaagacctaattttaaatgaattacctgattcacaccaaaggatgatttcgcatattatacaagagacacttcaacaacatagtattgaaacaactgatattcaaatacaacagcttttaattcatctcattttaatcattaaacgtaagcaatctttaagtgagctagacacgttaaaccacgatgcaaaattgatatctcaatcttgcattaagcaaatcaacgaaagattaggttatgacttgaatgaaaaagtaatcaatatgttttcattctttattgcttatcattttaataaactcgatattggcatagaacgtatatttatacaaagttatattgatcgcttaatcgaattgatgcagcaacgtattcatgtacctttcaatgaagattcgattttacaacaaaatttatataatcattttagtaaagcatatttacgtatcactcaaaacatttatttaaacaatcctttagttatagagattaaaaaactttatccctttgtgttcaacacactttttgaagcgattgataaattagcaattgatactgatatagagatgagcgaagatgaaattgcctttttaacaattcattttcaagctgccatcgagcgtcgtaccaaaacacaattaaatgtagtcattgcttgttattatggtctaggtgtgtcgaattttttagaaactaaaataaataacttatccgaagagttgtcagtgataaatacgattaaactagaaaatataacacactatcactttgacaatgttgatttactaattacaactcacgatatcccaaagcaaactttacaaatgctccctaagcacctttcaactatcaaggttgcaccattattttctgaggatgaccgtcacaaaatcatacacgttgtgaagcaaaagcaaaatccggttcaagcacatcatcatatggacactgttaatttccttgtcgtaaatactgaacaaaaaccacgacatactgtgcaaatttttgaagaagctcaaaaaatattacaagcacatcatgcgattgtagaaggatatatcgaatcagctttagagcgtgagaaatcatcttctacatacataggtaattttatggcgattcctcatggagatcctgaaaaagttttacaatcacatgtgcttatttttcgcacaaaagatgtttttccatggcgacaacacgatgtcaaactcgtctttttcttagcaatttcacaaaaagacacagcttttacaaaacaaatgatgcaattaattgctaacttggatgatgattcagtgaaccatttatgtagtttagataatcatagtttaaagcaacagttatttgaatacttacaagaataattgccactagtaacggtaattattcttttttttagcatcaagaatacgcttacaatatggaaaaggagatgattttatgaaaattgtagctattacctcatgcccaaatggcattgcacatacatatatggctcaagaaaaacttgagcaggtagcaaaagaaatgggtgtggatattaaagtagagacacagggcggtgttggtgctgaaaatgttttaactacgcaagacatcgaagaagctgacggtgtcataattgcagctgataaacaagttgatctgtcccgatttgttggtaaacggttgattaatgaaaatgttcgcgaagggattcataatccgagaggtctaattcaacgtatcattaatcaagatgcgcctatttatcaatctgaaacaaattatcattcgaaagatcgcggtaagtctaaaagtggtattcaaatggtgtatcaacatttaatgaacggtgtatcgtttatggttccttttatcgtagttggtggactccttatcgccatcgcgctgactctaggcggtgaaacgacatcaaaaggattagtcataccggatgattcattttggaaatccattgaaaacattggtagtttagcctttaaatttatggtcccaatactagctggatatatcgctgttagtatcgctgacaagcccggtcttgttcctggtatgattggcggcgctatcgctgctgacggtagtttttatggcagtgatgcaggcgcaggatttttaggtggtattgttgctggtttcttagcaggttatatcgcaaagtggattaaagatattaaagttccaaaagcgatggcaccaattatgcctatcattattattcccattatttcatcggtcgttgtaggattgatatttatatttttaatcggtgcaccaatttctaatatttttgaggcattaacaacctggttaaaaagtatgcaaggtgctaatattattatacttgcgatgataataggtgcgatgatcgccttcgatatgggcggtccagtaaacaaagtagcatttttatttggctcagcacttattgctgaaggtaattacgccgttatgggtatggtcgcagttgctgtatgtacaccaccaatcggtcttggtttagcaacgtttgttcaaaagtataaattcaatcattccgaaagagaaatgggtaaggcttccttcactatgggactatttggtattactgaaggtgctattcctttcgcagctcaagacccactacgcattatacctgctaacatgattggagcgatgattgcatcagtcattgcagccatcggtggtgttggagatagagtggcacatggaggtccaatagtggctgtattaggtggtattgatcatatattatggtttatctttgcagtgatagtaggtagtcttgtcacaatgattactgtactattattaaaacgtcgcacaccagttatagcagtagatgcaccagcgcaacatacgcaacttcatgatacagatataacacaacatgatacagaggttgacaatgtagataacaccgcgaaacattcacatctcaataaaccttctcatgtgtttgatcaacaaactatcattattgctgatcataacatgtctcgaaacgaagcaatcgatacgttgattcatcaacttaaagtgtgccgttatgtagagcacacatcgcatttaaaaaatgcaatcctagaacgtgaaatggagtctacgacagctattggcatgaacgtggccattccacatgcaaagtctgatgttgtaaaacaaccgattgtagctgttatgaaaaataatcatggtgttaaatgggaaagtctagatggtagtctacctcaattgattttcttaattgccgtaccaaacaacagtcaggatacacatttaaaaatacttcagcgcttatctaaagcgttaatgaatgatgagacgcgccaatcactaattaatgcaaacagtactacagaaatttataacttattaatgaaaatatagaggagttttaactatggcattatttttacaacccgtttttaaagacagaatttggggcggtcatgcattaaaagcatttaactatgatatccctaatgaaacaactggtgaatgctgggcaatttctgcacatccaaatggtcctaatacaattatcaatggtccatacaaggatatgaccctagatcaactttggtcacaacatcgtgaattattcgataatgattcacgagatagtttccctctgctaactaaagtattagatgccaatgataaattatctgttcaagttcatccggatgatgattacgctttaaaacacgaaggcgaactaggtaaaacagaatgttggtatattttagatgcagccccaggtgctgaaattatatatggcgtacatgcacataataaacaaacgttaaccgacatgattgataatcatgaatttgacagtcttttcaaacgtatacctgttaagtccggtgacttttattatgttcctgctggcactgtccatgccattggttcgggtattttaattttagagacacaacaatcatccgatacgacataccgtatttatgactatgatagacgagatcaaaatggtcaattgcgtgatttgcacttagagcaaagtaaagatgtgattgaattaggcaatcatgaaccaaatactactcctataacaactcacatcgacacacacactgtaactcaatttgtagataatcaatattttgcagtatataaatgggatattcatggagatttaaaattcaataaaccacatgcttattgcttagttacaattatcgatggtactggcactttagcagtaaacgataagcactatgacatccaaaaaggttctagctttattttaactacggaagatgaagatattcactttgtcggtaatattagtgctatagtaagtcatcctggataatagcaatgataacacccgtcccataaaagacagaaattactatctcttctgtctaaaaacataaaaatccacacattaaggagctataaccctaatgtgtggatttaatttttattctgtaacgttactttggtcaactttttcagatacgcgcttcatcaatggatctgttacaggttttaaaattaaacctacaacgaagaatcctatgccaaataacgttaatataattaattttgtaattaagatttccggaacaataccgcctactgtttcacgtaatgaatcaattgcatacgtaaatggtaagtatggcgaaatgttttggaaaaattgtggtgtcgtttgaattgggaatgtacctccaccacctgcaatttgtaatacaagcaatacgattgcaatggctttacctgggttaccaagtaatgatacgcacgtatatacgattgagttgaaaataatcgaacagaaaatcgttataagtacgaataatacaggtgactcaactcctgcttttaggattaacaaatctccaaccgatacaatgagtgcttgcaacataccaagcattataaagaatcctgctttacctaagaatacttgtcgtgtcgttaacactggctctaagctcttatgtttattatcaacagttaataggcttaccattaagagtgcgcctacccataccgataatgcagtatagaatggtgtcatccctgatccataatccttaactgggaaaacatcaacagtcttcttattaataggatttgcaataatacccgcttgctttttcaaatcattcttaagtgtgtcgattaatttatcgactgcatcgtctttgtctaacttcttgaaaatcttattcgcttttttcagatctttttcaacatctggcaatttattttgtgcaaaatcagctaaatctgataaagcctttttcgcttgtggctgatttttatttagtaatcctaccgcttgatcataaccatttaataacgttggtaaatttttattcacacttgcagtcgcattggttaaacgttgctccaactgtggtaaatcgttacgtacaaagttagctgctttcgctacatcacttttcactttcgggaagtttgcttgagcatttttaatagcactaatgtattgttgttcaatacttggtaatactgtttgtaaacgatcgatacgtgttttaccattttttaaaatagattgaccactgttgatgacttgatcaattgtatttagcttagactgaacattagacaatgccgtttgccctttgttcaattcatccataatacgttgtgatattgatactaaagagctgttaagatcttttttaacataatctctaaatgatgataatgatgaatctagttttgacagttgatctagtaatttagtagcttcagcagttcctgaactaccattctttaatgcattacttaattgattaactaaccttaatgattcattaattcgattattagctgtctttaccttatcaatttcttttgataaatcaacattttcattcttctcaatctcttttaatgtatcgataaattgttgattatattgagttgtgtattctaaaccggacttaacattatctaaagactctctaaaatcagatggcttgtccgatgctaaaatgccatacgaaatattacgtaatgcctgactatctttttgtgcggctttcgcttgggtatctaaattatttgataatgataataaagagcccgttaatgccgcttccattgatttaacatctttatctgtaatattttgtgtgttctcgttagctgtgctgacttgtgttgttgttatatctgcaaaactttgaccatcttttttcccgcttgtactttgtggtgtagtcgatacaggtgcattattactatttggtgcggtattttgcgtaacattattatttggtgtagtattgccatttggtgcacttggtggcgttgatgttacaccattaccagctgcaggtgcactatttgatgtttcgttgttcgccgcgctattttgaggaatctgttgctggtttcttcgattcaaatcttgcgcgcgtcgaattgcttcttgataatcaccgactctacttctaacttgtgtgacgaagcctttggcatcatttaactgtccattagcttgatcaataccttgactcgcaatgttaagtccttgattaattttagggaactgcgctggcacgtcatcagctgcaaaatttaacgctttttcaattttcggcatataattatttaaagctaatatcaacttagccttttcattaagttgcggaatagcaccattgacttcgtttaattttttctgagcatctaaaatatcacctttataatttcctagttttctaaaatcattcgcatatttatctaaatccgcttggtggttattcaaatatacaattttattcgcaaagtcattaatcttaggtaaagctttatctgccgaatataccgcattttttatcttattaattgtcggcacattttcttcaatagttaaacctgctttgttagcttcttctaataatgctcgagttactgttttattaaattgttcattcgctttttcaacgacaactgacgaaccagtatctgttagcttagacgcaacagcgttaatcttctgattcaccttaaattctacatctgctttttgaggctgcttacgtagtgtcccggtaatttcatgtgtaaacttagatgggatgtaaatacctgcaaaatatttacccatttttatctcatgatcagctttctctctacttacaaactgccaatcaaaacttttatttttcttgagtgtgttaaccatcgtattaccgacattaacttttttccctctgattgtgtcgcctttatcttcattaacgactgcgaccttgatgtgtcccgtgttgccatatggatcccacattgcccataagttaaaccaagcgtagaacgatggcaaaatagctaagcctgctaagataatccacacagctggcgtcttagctactttcttcagatccattttaaataatttaaatgcgttcttcattgtcacactcctatgtaggaattattcatattttttatatattttttgtaaattaatttatttttgcgttgtgaattagtataatcaatttactggaagatatttagtcgattgatacctatcaactattttcagcatacgataaattataacaaatcatagtttattatcacacttaattattatatttttcaagggagaatacgaaatatgcctaaaaataaaattttaatttatttgctatcaactacgctcgtattacctactttagtttcacctaccgcttatgctgacacacctcaaaaagatactacagctaagacaacatctcatgattccaaaaaatctactgatgatgaaacttctaaggatactacaagtaaagatattgataaagcagacaacaataatactagtaaccaagacaataacgacaaaaaagttaaaactatagacgacagcacttcagactctaacaatatcattgattttatttataagaatttaccacaaaccaatataaaccaattgctaaccaaaaataaatacgatgataattactcattaacaactttaatccaaaacttattcaatttaaattcggatatttctgattacgaacaacctcgtaatggtgaaaagtcaacaaatgattcgaataaaaacagtgataatagcatcaaaaatgatacggatacgcaatcatctaaacaagataaagcagacaatcaaaaagcacctaaatcaaacaatacaaaaccaagtacatctaataagcaaccaaattcgccaaagccaacacaaccaaatcaatcaaatagtcaaccagcaagtgacgataaagtaaatcaaaaatcttcatcgaaagataatcaatcaatgtcagattcggctttagattctattttggatcaatacagtgaagatgcaaagaaaacacaaaaagattacgcatctcaatctaaaaaagacaaaaatgaaaaatctaatacaaagaatccacagttaccaacacaagatgaattgaaacataaatctaaacctgctcaatcattcaataacgatgttaatcaaaaggatacacgtgcaacatcactattcgaaacagatcctagtatatctaacaatgatgatagtggacaatttaacgttgttgactcaaaagatacacgtcaatttgtcaaatcaattgctaaagatgcacaccgcattggtcaagataacgatatttatgcgtctgtcatgattgcccaagcaatcttagaatctgactcaggtcgtagtgctttagctaagtcaccaaaccataatttattcggtatcaaaggtgcttttgaagggaattctgttccttttaacacattagaagctgatggtaatcaattgtatagtattaatgctggattccgaaaatatccaagcacgaaagaatcactaaaagattactctgaccttattaaaaatggtattgatggcaatcgaacaatttataaaccaacatggaaatcggaagccgattcttataaagatgcaacatcacacttatctaaaacatatgctacagatccaaactatgctaagaaattaaacagtattattaaacactatcaattaactcagtttgacgatgaacgtatgccagatttagataaatatgaacgttctatcaaggattatgatgattcatcagatgaattcaaacctttccgcgaggtatctgataatatgccatatccacatggccaatgtacttggtacgtatataaccgtatgaaacaatttggtacatctatctcaggtgatttaggtgatgcacataattggaataatcgagctcaataccgtgattatcaagtaagtcatacaccaaaacgtcatgctgctgttgtatttgaggctggacaatttggtgcagatcaacattacggtcatgtagcatttgttgaaaaagttaacagtgatggttctatcgttatttcagaatccaatgttaaaggattaggtatcatttctcatagaactatcaatgcagctgccgctgaagaattatcatatattacaggtaaataaatattattaaacccgtaaaatttataagtataaacaaggagttcggacttaaacatatttctgttcataagtccgatttcttattcaattaaacccgaggcattcagttcgaacgcctcgggtcattttatataaatatattattttatgttctaatgttcctcaacatatccgtttcaattgccatctcacacattttataaatatgagcaaatgtacttattctcaaacattactgccgagctttaattgacgttatatttactataaactacttttccatgactctacggattcaatgtcacatgagcgtgataaaatttgttcaataataaagtcatgtttatcatctgatctatcaccaacagcatcttctaaaacagtaatataatagtctttatctacactttctaatgccgtgctcaatacagctccacttgtagagacacccgttaatactaaatgattaatatcatttgcacgtaaataaacttccaagtaactacctgtaaatgcgctaaagcgtcgcttagaaataatcggctcatcttctagtggtgctaagtcttcaagtattcgtgtagatgcatctgcttcagtaatcgcatatccttgagctttaattgttgaaaacactttattactcgaggagacatcattaaaatgcttatctaacactaaacgtatgaaaatgactggtattcgatgttgtcttgctgcttcaattgctctctgattcgctttaataatattctttattctaggtacactactcgctataccttcttgcatatccaaaactaatagcgccgtttttcgagacatcttcattctcctttacttgtgtagttctaagtcgttaaattcattataacgttaaaatgatggacaatctattcattgcattttgcatatacttcacaataatttaagggggaaataagacgtcttatatacttaaaaaatatatagatgcacttcccccaatataattatgctttatttttcaacttattgcgtcgtgataaccaaatcattagtacacccattgcaccaacaattacagatatcggcaaccaatgttcttttatcgtttcccccgctttaggcaaagatacattaccatcagcatttaataatccacttaacaatccattccctttaccaagtgttaacgtcttttctggctttggtgtgggtatatctggaatactgtctaataaatttgatccttgattcattaaatttgctaacttatttaaatctgtcgttttcccatttttattcaatcgatctagtaaacttggacgatttactattggtgataaaacatagtctatatcttttttcgtttgattgagtctcttttgtaaattcaataaatcatccgctttaccattcaatgccgatttaactaaattaaaaattttattttgatctgtttctattttagtaattaaatctgccagtaattttgccttttgtctttctatacgtgttgctaaaatcgtttcaattgcttgttttttatctttggcattattcaaaattgcttttaatatatcatctgaagacgtgtcgccagttgatgcaaaatgtttcttcaattggtcaacgatttggcgatttgataatcctttattcgtccaatctttagccaatttatctgcttcagcttttcctaatttcgtttgtaaaatttgagaaatcaatagcgacttatcttgtgattgatcaatcaatgacgttaataaatcatcactcgttgtcagagatagttgatcaatatgacgagtaatttgatctgcaatttgttgatctgttttaccatcaacacgtatatcttttagaattttatctgcctcgtctttattaaatatactttctaaaatgcgttgtgtagcatgctttttatcatcagtacgtgcaagttcttccaaaataatatttcgttgactttttatacgctctttcgtcttatttacttcgctcattaagtctgatttttgatttttaggaagttgcgtatttgcaatacgttgatctaaagattgtaatgtattcagtttatgatatgtgtaatgttgcgttgaggcattacttttagccaatttttcaatcatagcatgattaattttatcgcttccttgtaatttatcagtgagtcgattactatggctttgattctcttcatttgaaagaaatttatttaacacaacatgtccagaaccatcattatttggcgttttagctacttcatgattattatctgttgtagacactgctgaatcttccgatttgtgtatttgctgactcaaatggtctaagtcttctaacgccttatttaccattgcttcatcatttttatcatctttttctccatgttttgttgtagccgtttgtgacatatcatttttcattgcattaagatcgtcctcgtcactttgttgacccctatcaacctttgaagaaacctcatttaaatctttaagcaattgatctaatttactgtctatatcactttgaccgttcatttcaatttgagaacctttattgtctttgctatccaactcattagctcgttttatgatttcatctatttgcgatgctgttttcgcttcatttagttgtgctttataatgtgctttagatgaagccgataactgttttaattgctcaatttgacgatttgctttgtcaactttgtctaataaatcttgcttagataatagctcttttgaaatttcagtatccttttcagatacagcttgggcatcgtacggcaagatattcgttaaaatgatactagtcgccatcattgtcgaacacgataactttacatataattgaaacggtttccctcgatatttagccatcaacatactcctttctcacttacttccttaaaagaattacatactattatatacctgtttacaagaaatttacacttatctatctagttattgttgttagtaattatctacttattacttagcttatatttaagtaaacaaaacaagcatgacgtaatatcatattgtccatgtcgctaacatcatattacgtcaaatcttttatattaaatgatgttttattttagactgctttttctttttagctttcgaacgcctgtttaaaaacttgctcgaattgttcacgcgagatttcgtgtgcatgtgctttttgtgctaataaagcatctcgaaactgttgttgatctttcaaactttctaacatttgtattaattggtctttactttccattgttatctcatcattatgctcaaataagtgctctgatagtgttactttagcatggtgtgctgtttgacgataacctaaaatcaacaactcatagtcaaacgcttgttccaccgcatttaaaatttcattaccctcattaatatcaagataaatatcacataactggtatagttcatttaccctgtctatattaatagatgggtataagtgcacattagcatattgatcaagttgcattagcttatcagacatctctgtaatagcagcgatgtgaaacttaaaatctggtaaagtttcaaccaataccttgatgttacgaagttgatccgagttagttaatattacaatttctttagtatatctattacgactacgataattatatagatatccgccttgtaaaatacgagatttaacctttgcgtctgctatattgagcatcgtttcatattcgtttttatctggaataataatattacaatgtcgtttcatatcacctttacacatcaattgcatatttcccgggacattaccatcgcactgttcttgccataccaaaacatcactaccatttgatggcaaattatataacactgaaaatggtagggctagtgagttaataacgaaatgatgttccgtaatttcaagttgcttgataaaaaataatacgaatgcgagctttgaagggaaaaagtaagactttccttgccaatccaatatgacatcagatgttacaaaattttcataaatcacttctttaccttctgctgtcatatatttcttcaagatcgctttacgatttaaatcgtaaacagtttgtgcaaatttaataccattcttagaataataatcgacaaatcggacacgttgttggtcatcaaaccattcgacacgactaacaattctagggcgctctccactttgataaaatattttgcctcgtagacgtcccatatcattaattgtagccgaattgttgttacctttaatttcccaaaaagctggtacagtaacctgattaaaaaatcgtggtttcatattttctgtattatgattatctgcaaaaaattgatacggtgatataacatcgtccggtaaaaaaccattgtcattgagtacaattgttaaatcttcctccaacttactggctttaaaagactcatataactttcgtgaatgaccgttaaagtaatcaaataatttaatcatgcagcacctcttgaactaatgtttcccattttaaaataatatcttgagtcataaattgctgtgccacttcataagagatgtaatgtggtgtctggggtccattgttaaaatacattacaatggcatgagctagttttgcgacaacatcatccacactatcttcatcggtatcaaaaggtaccaagtagccattttccccatctcgaataaaggttgggttaccataattcacatttaatccaatcatacctagtcctgagcctaccgcttccattagtgttaatccaaaaccttcgctagttgatgcagaaagaaataactcataatcagtataaatttcatcaagtttaacatgacctagtaaacgaatataatcttgcgcgcggtgtgtatcaataattttacgcagtcgcgtcttctcactaccttctccataaatatcaaatgttaattctggcacttgtcgtttagccacgataactgctttgacaagccaatcaatatgtttctcatttgctaaacgagatgcactaatcatcgcgtatggctttcttgataatgttggatatgataatgcatcaatgcttcccaccggaatagtataaacacgtgggcgataaccttgatattgctcaaattgtcgacaaaccatatgattttgaatatctgtcgctgtaataaagaaatcaatgtatttagcttttgaaaattgatattcataataattgttccatagtatatgctgctcgctcatcatattattactataatgatcagcatgaatcacaacaccaactttactatcacctttatgctgcaaaacagcctgaccaatatcagaagcgcggtctaatatgacaatatcgtctcgggttaaattcaatcgttgtaaaaagtatgcaataaattccgttttgttatacaacaccgcatcttcaaacacatatatagagctgtctccatcaatatattcgttataagtgatggagccattttcattatagaattgtcgcatatataatttcgctttattatcagctggtgcataatactcagaaaatatgcgtgtataactataaaaatctttacgtactaacatactattaattacaaattctgcacgatccacaatgtctttttgttcattttgcagataacatgttacaaatgatgatttcccattaaaatataggcggactatcttaccatttctttctctaaaactaatatcatgaccaagctcacgttcaatgtcatctaacgtgtacgttgttggtgctatagaaatatcactaaaatactgatacaaccaaataacttcttgatcttcaaacccaatgttttgcgttaatgtctgtatgttctctgactgtataaaatctaaaaacacaaatttagtgtcttgatttgtgcgtctcaataatttagcacggtaagcttgtgcatattcaacaccgctactcgcccagcctataccaaagtttatattatatattgtcatgcgctaccccttttcgtttatggaaaatgtataactggcataccttctttatcaaatgtaatcatgctttgacaaatatttttcaccattctttttttgatatttcgtgtcataacttcaaatgaatctaatgcaactctatggtattcaaaaatagcgttacgttgcccattttgtcgttgattaacgtttgcttttaattgttgtaaatagtcgacttgttctaaccaacatgaatcaattgcttttaaaaagactttttgaacgaaaatattataataatatgcactttgcatgtttttacgattcaaagctatttgcttttcaaattgctctaataaaaatgttactacagcttgcttatctttaaaattaacacaagccacatctttattaaattggaaacttaaattttgataaatatactcgacaacacgcgattttgttagcaccttttcctcatttacaaacatttcaaacacatctttagctaacactttaaaatctcgattctcagcatcatctatttctaaaactcgattgcgttcctcgtatacaagatctcgctgtatactaatgcttttttcaaattcattagccatttcacgagctttaaccccttgttcttccgagatacgctgcgctttaactacaatttgcttaactttgcgattaaacaaactactttgcgataatcgttgtgcatctaatgaatataattgattattttccgctaaattactatcgctccatcgcttaactaaataatcatctagtgaaatatatatacaagatgatcctggatccccttgtctaccagaacgaccacgtaattgcctgtctacacggctattttccatatgttcatgaataataacagctaatccacctaatgcttcgacaccttcaccaagtttaatatctgtgcctcgacctgccatactagtcgcaacagtcatggaaccaatttgccctgcttcagctatcatctgcgcttcttttgcaacattttgcgcaatgagtaaattattaggaatatccatttggaaaaatacttttgaaaagtattcagccgcttcagcagttctcgttatgagtaaaaccggtcgccccgtttcatgaagttcaactatatcatgaatcattgcgatgtttttctcatcaactgaacgaaacactttatctggttcatcgatacgttgaatcgctttatcagttggtacttgtacgactatttttgaatacaaatcaaagaactctgattcgcctaattttcctgtagctgtcatacctgaaaatgattcaaaaagtttaaataaattctgaaaggtaattgttgccataacacttttatctgttgaaacctccataccttctttcgcttcaatagcttggtggagtccagcttgcaacttagttcccggtaacatacgacctgtaatacggtcaattaaaacaatatcaccattatatacgaaataatcgacattagattcaaacaaatattgcgcgcgcagtgctagattaatattacgcactaagaccatcgcttgttcgctatataaatcttcaacattaaagtatgattgtgccgcttcaataccttgatttaacagccatatttcttttttggtcttcttcattttaaaatgcacgtcttcaatcaatgtatctacaaactctttcacaatatgaaatagatttgattgtaatcttggtgcgcccgaaataactaatggtgtttgcgcagcatctaaaatgattgaatccacttcatcaataataccgtaatttaattgtggtaaaaatttcccttccgcactatctgccaaattatcaattaaataatcaaaaccgagacgtccattagttgtatatataatatcatgttcatatatattacgtttttcccctttttgatactcataatccacaatatcaacaaaacctaatgaagcagttaaacctaaccattcatataatggttgcatctcttcaaaatcacgcttcgctaaataatcattcgttgtaattaaatatgttccttttcccgaaagtgcatttaaatataaaggcatcgttgctgttaatgttttaccttcgcctgtttgcatctccgcaatgttaccttcatgcaatacaatcgctccgattaactgaacttctttaggatacatacctaatactctccagctcgcttcacgtgccactgcataagcttcaggtaacaatgtgtctagtgtatcaactcctgatgctatacgttctttaaattctagtgtcttttgttttaacacatcatcagaatatgatttaacttcatcgctccatgtattgatgcgtttcactatttttctaatcgactttagtcttaattcgtttatcgtaacatctagtttatgtttcatttacttccccaccattcagtttcgatacatctaagtaatctaaaaatcgtactggattcattaaacgtgacatataatttagatggttgtcttgctcttctttaaaataaacctcgacatttgtatcttttagttcatgatttcctgggacatgttctgtaaaccattcttttaaatcatcatcttcatggcttgtacgatacactttgcaatccaaatgctgagcgacataagttgcaaaaacatttgactttgacccataactaatcaaattaattgcctttagggtatcttgactttgcaaatcattctttagttgcttaatatttccctcgatattgtcgtccatccaacgttcaacgagccaaacatgaccaaacgatttcaaaaaatcattcgaaatagttggataggcgtcagatggttctgcaataatgacattgatcctatcatttccatattggtcatcgcctatcttcgtcacccgcatgcttttatattctaaattatcttgatgcgtcatctctgtaattgttaaacatctaaatataagactcgtcgatgctgcattcatcatttttattttataagcataggcttcatcaggatattgaatcgtaatactatttgactttacaatctcagtacttagttttgtgccatttttattataaaaaatgatgataaaatacactgaaccagcaggcgttgcatcaaaatcaaaatgcaatttataatgctgtcctctacgcaaaattggtaaacttggtgcacttttatattttgaaaattgttttaacatcaaccactcatgaatcggtaatccagagggcatcaaaggatttataaaagttacttcaccatttgaaaatgatacttttgagccatacataaatgtagtttgtgaaatataattccaagtaactttaaatgttttgtttttcagcatgttgaactctcccaaacttgtcttccaaaataatgttgtaaaaattaacaaaccaacttgcaatggtaggtgaatcatcattatgtcgcccaggaatactgcgattcatcactcttgcttggtgtgctgtcaatacaggtagtagctcttgaaatgcatgtggatcataatcatcatgttgcatatatgctatggcaaaaacagtttgtgacaatgatttcttttgaaatgtttgccaaaatttttgatttaatgcctgtatcgacgcttgagatgtatcaccttcattagacaccaggacgtctaatgctgtaccgaactcttctggtctaagtaatcgcatatgttcagcaatcgttccaatattaacaagtggtttaccaacaataattgcctgaggatttaactgagcaccataatacaaggcaccaaatgaccccatagataaaccagataatattaattcatgtgatttaaaattcagcttttctaatgtctcttcaataacattgataataccttgttcatattcagatgaaccgatataaaagctaccaccttcaacacgaggatcgccgattagtaaaaagggtgcattcatacgtttcatcatataatatccttcgaaaccttccgctgttcgataaccactaaaatatacgtttagtggtggtttcatatcaccagggtggaaataataaataaattcctgtcgttgactatctacaaaacgactaccaccgagtaaaaattgacccatgtctaatctagaccatcgtttgtgtataggtcctaaatgtaccgtcccgttccctcgcgccttaacagttacacttatataagcatcaaatggtttcgtaggtatctctaaaggactgtctaacatatcatcagtcaatatgatttgttcaattaatgcaccatcagcgccagtttgaatcaatctaaatgtatattgcaactcgaccgcaccatcaatatcaaattctggccatatttgaatgactttatctttatcgtaaacgagattattttgccaagatgcgataggtttaaattcttttccaaattctccactcaacgtgagctctgaattaccttggtaaacgacatctcctttaaaattcggatgaacaagtgctaacttaggagaaaccttatctccatactgtcctgagaagctaactgcctctaatttattattacgttcttcaatgttccggtaatgtaatggttgaacaacgtatttttggacattttcgtcttgttcatattcaacagaccaaaatgattcatcaacatacgtattgtatggttcgcttatcatttgtaataaattcgttaatgtctccgagtatggtgcttgaatatagataaaatcaaagcgtccttctgcttcaacaatcgcttcaatagcctctacataaccactatcaaattcaaacaatccaatatcgaagtaatcccaactcacaccttttttgtgttggaaaataggttctaaatcgtctcctccaatttgcaaaactctaaatttacgtggcatcattttcaccttctattaactcatcgagctgattaataatattcttagaagcatatgcatctattaattttaaagaataggcgtacgcataattccaatttttcaaataaaataaataataatttaacgcatcatctaattcatcaactgtatttataatacggccattgtcataatcagagacgtaatctgtttgttgaccattaatttgtggaatcccagcgctaattgcactaatttgtaaatacaaatcaggttcttttgacatatctatcacaagtcgcaacgtccgcaatgcttctacaacatcatgttcagcatgtatcgtcttaacagcaatgatgtcatcttgatcttcaggtgtcattaatgctgaaacattaacatcggcattctgtttagcttggtattcctcatttaccgacgtaatacattcacgaagccacatcggtatatcattttgatggcgcgttaataaaattaaacggtaattatcttcttgtgcgatataatccacaagtcgttgcatcatttgttgcaaatcaacgtcactcataccgtctatccatacacctataaatgtttccatcaattgactacttatattaggtgattgtctcgtttcaaatggcgtgattcgaatcattgtattctctcgctgatacttctcttgatgactaattaaatcacgttctagttgcacactatcaacaattaaatgggcattctttacgatagattgatattcctcatccgacacagtttcatttctatttttaaaaaatgaataacttaatgatttcgccggaatatgattggctatttgtcgattgtgcctagcatctgaagccacaatcacatgatcatcttcatgtatttgatgtgcaatcattgcttgaaatttttcttcaattagttgagccatattgttatattctgtttgttgatagtgatgttgatatctttttgaaacagtgactctgccatttttcaaatcttcatgaagtacacaatctccattaatcgttaaatattcttggtaagaagcctctccctgatcatcaaaataacgtatagctgataaataacctctgtcatcaaaaatataacgccgttgtaactgatctctttcaaattcttcaaaccaaattgaatacccttcttgactaaaataaatatttgtataggtctgttcactcgtcacacattttaataaatacggcgtgtacacaaactcaacatcatccggccattttaagtgatgataattaatcgcttgtggcgcatggtgactgaatccttgaatttcatcaaacacagaccaatactttgtctcatataagtcatatcgatgtaaaaatgttcttaaatttggtgcatgattgagaacaatcagacgataatctaagtcattttcaaggtgcatccccatcaaactaatcatatcgtcaaattccgtcttattttgtagttgataatacggcacagtcgtgtcttgccaccatcgttggtcatcgtaccaagctggaataaagtatttcataattacctccttaccaatactggtttaaaaatggcttatatttatcaaaatataaatatgtacgaattgtttctgcaatattaatactgatgtaaactaatacaatcagttgtactgagaaataaatttcagtagataaatgcggtacaaacaatgtgaaataaagtggtataccaataatgactgtaactaatgccgatccaaaccaacatacgcgtcgtgcttgataatttaaataacgttctgtatccttaccaggtttaactcctgaaaaataattgccactctttaagaaatctttggatttttgtttagtattgattaaaaatctcgataaaaaataacccaataacatttgaatcactaaatacaccgaaataccaattggactatcaaatgtcatcattggcatatcatctgaaacgtctttattaaacatagataaaataaaatgaataccacttttcaagaaaacaaatgctgaaatactcatcattaaagtaatactgcctgcagggttaactttccaagataaataagatctcatatttgttgcggaaacgttcattaaatcgatatatggtattctcacttctactaattcaatgaataataagataaacaatgtgattatcacaagagtgattaacaacgcaatcacaatatgacttgcatctatatattccattttttgatgcatcattgatttaataatgctaaccattacaatcggcattggtcctgcgatgccgtaacgactatttttgtcagctaaccaaactaataacatcgttccagtaaccaaaatcaagattgttaagtaaatattgtcttgatgaacacgttctttcgaaacatattcatgaatcacaaaataactttgaataacacttaaaattaatgttaagatgcgctctttataatgcttctcaagacttgtttgtttcatgtatttatccatattccgataagaaatcagcatcaagataatcattgatgttaaccacggacctaatcctaaagtgaaaatgtttaaagtattaacgtctccacccatattagaaatagctattttaaaaaatgactcatgttttacttgcatatcgttataggaaacgatggaaatgtttgtacctaatatataaataaacaagataaaacatgtgtaaagtatacgtttatatataattttatattcgtattgttgtaaaagttttaacatgttgcacctcttttatatcaaaaacattaaaaagactaaggttatttcactaattattaaaatctgatatagattttttagtgaacaacgccccagtctttttaattttagccaactataaattcaatttatgcttgagaatcatcttgatcattttcatctttctttttctttctcttcattaaacctaaaccaactaataatgtcataacgccacctagtaatccattttgttttattgagtcacctgtatctggcaatcttttttcactttgtgctggcgtgccattatgtttagtcacttcagatgttgcacttaatgtagactgagattcactcgtgctcgttgttgcttcacttgatgagcgagatgtgctcgtgctgtgtgtatgatgcatactcattgagtctgacggatgcattgagttagattcagatgtacttgttgagccggacatacttgttgatgttgagttgctcattgaagtcgagttagacatacttgttgatgttgagtcagaaatgctttgtgaaccagacatagatgtactcagcgattcggatgtgcttgtcgaatcggatgtgctcaatgacattgatgtgcttgttgacactgattctgagtcgctaattgatgttgaatcggattcacttgcgcttgctgatgtactaattgccttcgatgtgctttctgatgttgagttgcttgtacttgttgagtcactgagcgatgttgatgtactttctgatgttgagtcacttgcacttgttgatatactttgtgaatcagattcactctctgaagcacttaatgatgctgatgtgcttgttgaacctgattggctcgtacttctagacatacttgttgaatcgcttagtgacgttgatgtcgatgtggattcactttggcttgttgactgacttgtatatgatgatgtgctttgtgaatcggattcgctcgtgcttgtacttgttgaggttgaggcactttggcttgctgagtttgagtctacaccgctttgattcattgaggcactcagtgacaatgatgtactagttgagtcagacaaactttctgatgttgacacacttgtacttcctgatattgattgggacatgctcaggctcattgatgttgaatcggatttactttcacttgatgatgttgagccggattcactctcactcgttgaaacgcttaatgatgtcgatgtacttaatgactctgattttcttgtactgattgaatcacttgtcgacattgatgcacttagtgaattagacttgctaccacttgctgaatcacttaatgatgttgacaaacttgtagagtcagacaaacttgtactcgttgatgtgctcaatgatgttgaaacgctatcgctcttatacgctgatgttgatgcgctaccacttattgacgttgaaatagatgtactgctacttgttgaattgcttaatgatgttgatgtgctaccagattcagaattactatctgataaagacgtactatcgcttgtggagccacttaatgactctgatgttgatgcggatgtgctttcactcaataattcacttaaaaaagcagatgcacttttcgactctgaatcacttgtactatttgattcacttaatgatatagacgtactctctgaaccagatatcgcttcactgatagaatcgctcgtcgacgttgagtcgctcgttgaatcagactctgatgtacttaagcttgtggaatcgctcatagatgttgatgtacgttctgaattacttgtacttaacgatgtcgaagtactcaccgaaccagatgtacttgttgagacactttgtgatattgattcactcgatgcagttgatgctgatttgctatcacttgttgaatcactaaacgacgttgatatgcttgttgaatcgaattgacttgcactcattgaaccagacgtactttgtgattccgacgtacgtactgaactacttgttgatgttgatgtgcttgttgaacctgattgacttgtactcaatgataatgacttactgtcagaatccgatgtacttatcgaatcacttaatgattctgatgtactacctgactgagacgtgctcatcgaactacttacggacattgatttactgtctgatgcagctaatgatccacttgtactcatagaatcgcttatcatttcagacgtgctcattgagtctgatgagcttgttgagacactttgtgatgttgctatgcttagtgatccagatactgaatcacttgtgctcgttgaatcgctcaatgattctgatgtactcatcgattttgaatcacttgtacttaatgatattgatgtactttgtgaatctgatttgcttgttgacgcactttgagagttggctatactatttgaaatactgatagagtccgaggtgctagctgactcgctcaatgattctgatgtactaattgaatttgatgtactatcacttaccgattgtgatgtactagccgaatcagatgtacttgttgataagctttgtgacttagacaagcttcctgatgtactcatgcttactgaatcacttaacgatgttgatgtgcgcaatgaatcagatgtgcttgttgatagactttcggatttttcagtactgctagagttcgaaatagaatcgcttaatgatgttgatttactaactgaacctgacatgcttgatgatacactttgtgaattcactaaacttgtgcttgttgagcttgatacactattactttcagatgtgcttaatgacttagatgcactcacagaatcagataggcttacacttgtcgatttcgaggtactagctgaagtagataccacaatcgatcctgatgtgctcgttgatgcactttgtgagtcagctttacttgttgacacactttgggattgttgtgtacttcctgatgttgatacggaatcactcatgctatttcttgttacttcatatttaaaagttgtcgtcgttttgttaccgctcgcatctgtagaaacgattgttatagtacttgtaccaatgtttgttggtgtaccactaatagtattatttgtgctatcgaatgttaatccagacggcaatcctgtgactgtatttgttactgcattcccactattatcttgcgtagcaattttaatcggggatattggtgaatacacttctgatgattgatctcctattggtgtcactgttggtgctgtcgtatccacaacatttattgtaaaagttgtcgtcgatttgttatttgcttggtcagtagatactactgtcactgttgattgaccaatttttgttggtgttccaatgattgaattcgttgcactatcataacttaatccgcttggtaatcctgtaactgtatttgtcacagtcccagtaccattatccgttgtagtcaacacaataggattcattgttttacccacttcaatggtttgattgcctacagttacagttggtgcttttacatcagtaaaataatatgtcactgattgtccagcattcgtcatttttacagttttatttgtatcattataagttgacgcatatgaactatcgacagatgtgtagttatatcctttagcagtcaatgcagattgctgattatcgattgtcacgacttgatcaacatttcctgaatatgtttttgggggaataatatctttacctgttgttacatcaacgtatctcacttgtgtaacagcagattctgtatattcgaatgttccaaattgtacttgttgtaaatttgtcgcgccacctgttgaggctgtcattgataacgaaaagttggtcgtaccactttttgcaatccaatctgaaatattacgtgtccatgtttgacctgcatacgttacagtcataacttttgtatcaccattataattaatatcaaaatcttggaacgtgttattcgtaggttgaacttttaactttgcagcattatcagctgctgaacttgatgtgtacgttgtcgcaacgccataactatctgttgtaacaaaggcaccaaacgcaccaccaccagctacattagatgggtctgcattcgcttttgctgctgcattcggtttagatgtattgtggtacgtatccaatttgaagccaaacgcattactcaaaccaccgatacctactgccgcaccatttaatcctgtttctcccaatacaccaggtgaaaaggcaaagccgataccatctccaccatttccattaccttcgtatttattacctaaatttacttttccagaaaaatgaaaacttttattagagtcaatacgtgttcctaatgtaatagcacctttttggctgtatgcatcctgcgttaacgtcacaataccggtactttgatcataagtagcattacctgacgttgtcatatattgtttgaggttatctttattaaccgtaatcgtattagcggttactgcacttgtcgttgcagctgatgcaaaagttgacatagctaatcgactgaaagttcgaagtttgataggtgctgtgctggttgacgttgtactagttttgtttaaattggctgaagctggcgttgtgctttgtgaagtagtatttgatgcagtactttgatttgttgatgtattagtttgttggtctgtacttgaaattgatgttacagatttagtatcagaacttgatgtagtattctttggggatgttgattcagatgtagatgtcaatttttcttgttgattgcttgtactattagttgtcgaagtgacattttcagacttttcacttgagactgtgtcactatttgatgtttgttccgaactgctatttttcgttacgctagtagaatcggttgttgatgttgatgcttcgattgtcgttgagttttgattgcctacggtttcactttgcgtgtttaattcagatgttaaaggtgcatcagaagccgcaaaagcttgctggtcatgcaacatgtttactgtgaatgcaccaccaataaccgctgtagttttcagtccgtatcccgttatttttttactaatgctttgattatcttgactcactaaactatgactaataaatggtagtcccataattttgaacatttcaatttctttaattccggattttacccaattttttccagatttataaagtcttactcttgtcttttcatttgctaagctgtcatgaaattctttctgtcttttactcatgtaataactccttgtattatctttacattcattagattataatatatgccactattcaatttaatacaactcttttttcaaataaaaaatacttaatttgtcaaaatccattttttctcaaaagtatattctttgatgaaatcgctttctttattgtgtgggatttagtataatattttaactatattctgaataacatgccttattatgtttatataattttgaaatcaatgtttatcaatttagataacttttacttatttagtaaaaatgtctttttattaaaatgtatttatcatccaccttttattcattaatagtcaatttacaactaaaagataaatattatatttatattacatctttaatattaaagtaatatcaatatattttcaataaacctagtgttatatatctgaatttctaaaaaattcttctttgaaattataaatatagcgacatatcgcttcccggttttgaaatataaaaatacatcgaaactaatttcaatgtgtagtttcgatgtattgaaaatgattgaattcactattccttgttatctgattgattatcaaaatttcttccttctaaacctgcaagctcttctttagaagctgatggtgctttcatttcaaatatttcattcacaaccgtgtaatcataatatcctaacctagcaataggtttaatcgacttaatgtctaatttaccattatcaagaatgaacttatcgtcaatatgaacctgagcaactcttcctataacaatatcaacggttgatacagtgtctcctgtcggaatacgaatcgtttgaacgtactcacattcaaaatgtactggcgattctttgactcgataacctggtgcttctatacatgcttctttcgtcacacctgcatattcaaattcatcctcttcaggtggtagtgccttcgacgataaattaacagcttctcttaaatcatacgtggccatgttccatacaaaccaccctgtctcttctgcattttttactgtatctttacgctcatgatcaccaagaacagattgatttgctgcgaacataaccataggcggatcccatgttaagttttgatactgactataaggtgctaaattatctttcccatctttcgatacagtagagatccaccctattggacgtggtactgtactacttttaaatggatcgtgtggtaagccatgactacttacaccttgcttcggcgaataattcattctatcctcaccccttattagtaattacatttaaggttacgctctcatgacataagcgtctaatataaataatcaatttatttataagaagaaactatatatgacgtggttgcttataatttgtgttcttgattcgaaaattttagataaggatttatgcaattaatatttaatgatgttttttgttaatttaattaatattagttaatataatcaagattagcttataataatattgaataacattattttagtttttgtataatttgcctatcaactgaaaaacagctaatacaaaggagctaatgaagatatgagaaaaattatgcgaatcttattatgcacatcaatcataataagcggttgctctttcatatcaaagaaccaaacaaaagatattccaaagacggttagcgtcaaaaattatgatggtaaatatattggtgaacataaaaaaagaaatgaagtatttctgaaaaaacataaaggtgaagcgataaaaaaatataaagactatgtgaaagatacatttggttatgattgtaaaattaatttagttgaggcctatactaataaatctggatttagcgaaaaagtaaggtagatggtttagtagtcgtcggtactgtcaattatgacgttccctttcaatttagactgatatttgttgagtctggaaatggcatagctatcacaacatttacacctggtcatataaatgaaacatcagcggcagttgcagccatgatgtataagcgttatgaacctgaaattgaacaagctcgattaaaattcaaatcagaagttgagaaaaacggttattatgccatgaatgaaaaacttcaaaagaaacaagaattcaatggtgttactaaacaatttttgaatttcaacacagacagtatcgatgatttggataagttcaaaaaagaattcaaacctgttatgcacttaaaaggagatgcattaaatcaacaattacaatctttgattaataaatatcctcaaatacaaaaaaatatgaagtccgagtttattgcctattacgataaaggtgagaacagagagactgttgctaactatgtttggaacctacaaaaatctataaatgacgttatgcaatcatatcctagcacaaaatttgtacagttttataaagatgatgtttccccgtcaatggtagatggaaatggccgtttaaaatcggatactaatgtaatttccatcgagggaggaaagtataatgagaacaaataatcatataacccatttagatgctattgagttaagtagcggttggaattacaattcgaaattggtagctggcaaaaatgcactactatcagatagccttttaagagatattaaagtattaagttctaatgctaaaggtgacgccgacatgttagaaacggaacttcatgctgttataaacgcaatgtctcaaaacgaaggtaaatctgttgatgcacttaaaaatagtaccgcttctctaaaaaacaatctaaccaaattaaaagagcaactcgataaaactacacattaatttcatacattttgagtgaacagaattatatttccatagcaaacattcctgaactacacatgttacataagagattcatttttgaagaaacgggtaaaatgataaaacaaccgtttttcaaaaaatcaaatattgggaggaataaaaatatgattttacgttacgtgaccaatttaaaacttgcgaaagagctataccaagccagtaaacctaaattgcaagaagataagggtatgattgaactgtttgaacatacttttggtttgcaaaaagaacttgtaaaatacgtcggcattgcagaagcaactactgctgctttatactcagctagctttatcaataaaaacatttctcgccttgcttcgctatcaacaataggtattttaagtgcagctgcttacaaacatttcgaagctggccaaggtaaaaaaggtgcacaacatgtattagatttattaggtcttgctactttaagtttactagatacattttcttgtaataaaaaatagtcttcattttagaagcacatactttagcacctgtgtacttttgatacaatccataaacggtacaccgctatagcatgtgttttgttatttttcaggtctatctattgtaaatattccccctaatttagcataatcatttccggctaaacgagaaacagcctgtaatgcgtgtggattgattttaaaattaccctcataaatactgtcatcaatatgataagttacaatttcgcctattattaagtcagccccatctaatacatctccaagcaatatcatttgcgatagtttacattcgaatctcattttcgcgtctttaattcctggcgtcttaatcgttgtagatgttaaaagtgataattctgtacgactcaactcactgtcaccatatgctaacggcgctgcagtctcattaatatcttgaacattatcttcgtctgtaatatgcacaacaaagtctccagtccgttctatattcaatgcagtatcttttctcttacctcctgcacgttgaactgcaatagcaatcattggcggatgattattaactatattaaaaaaactaaatggtgctgcatttactgatgcatcttgatttaatgttgtaacaaaagctataggtcgtggaataattgaaccaattaataatttatagttttctctagcagttaatgattgtgcatcaaacgtatgcataatacctacctcttttcttagtatatctaggtatttctccgatttcggttaatttaaacatctattctcctctgaaaatcacttgtatttatttagcaaatctattgaaatatgacacatatgcatatcttctggatatttttctaaatgttgctgatgttcttcagcacttttaatgtagttagacagcggtaagacttccactgcaattttatctctgtctttacgtcgttcaatgaactgacgcgcttcaattaagtggtcatctacacaactatataaacccgttcgatacttttctccaatatcatttccttgtcgattcacactgtatggatcaataatttcaaataaataattcatgatgtctgtaattgttaacatacgatcatcaaaatgaagtttgacacattcagcataaccatcatacggactgtctaatttagagcttcttccatttgctcttcctgcttctgtatgtataattccaggtattgttgtgaaaaatgcttcaacaccccataaacaccctcctgctacataaacaactgccatatttacacctcatcatccttttttatatttttaacaaggttataccatttaataccgccatgacatgattctgatacaccttcattacgataaccatatttttcataaaaagaaattaatgattctcgacatgttaacgttacaccatgtcgatgttgattcttagcaagattttcaaaatagtttagtaagcgacctgcaataccctgaccttgataatttggtgctacaacaagacctaacacactaatataaccaccttcactattatttgcggggacatttttaaataaatcatcgctaatgtaacgctcttttatgacaggaccgttgatatatccaatcacttcatcattcttttcagctacaataaaagtttcttgaatttgtacaattctcaatttcaatgcctctggtgttgcagcttcttccggtgaaaaaccaatattttcaagtgcaataatttgatctaagtcctgcatgattacttttcttaataccataaaaacacttccttagccttatatatcaaatataataccttcatcattatattcattattttcaaactaccttcactataaaaaacgagtctttttattaaaagccattcaccttaatcaattagacaagttgtattatacgaattagcaaataatcataattataattcattttaagcatactcaaaaagactggtacatgtataccagtctaattcgaaaaaatatatttagttaaaaccatttcaaaaacgacttcacttttcctggcttagtcggtctgtctagataaacaaaattatcattgattactgaactggcatttcgaagtaatgcttcaatgtcattcgaatatttcttcaatttatgattgtgaaataattcttgcatcaaaaatggtctttggtcacatgaatgtgcatctgaagctacaaaatgagccaaattacattctataaattgtaatgataacttttgaatgttttttccaaatccaccaactaaagaactcgatgttaattgactcaatgccccatttgcaacaagttcatataatatttctggatttttggcgatacttctatttctttcaggatgtgcaatgattggtatgtagcctctcgattgtatttcaaaaaacaattgttttgtataatgtggtacttcgcccgttggaaattcaattagtaaatatttcgaacgattaataccttgaatactaccattatctaagccttgcagaatcgaatctgtaattctaatttcttgcccgggaaataatttaatatccaatgcttgaacttctggatgcgttcttaactccgccaatttcacaagcacttgttgaaatgtattatcatatctcggatgcaaatgatgaggtgtcgctacaatacttgttacaccttcatccttagcttgctttaatagtgcaatactcttttcaattgtcttaggaccatcatctatatcaactaatatatggttatgaatatcaatcatgattcatcagtcccataatatgcatagtaactagcacttttatctttaggcattctatttaagactacacctaataatttagcacctgttgcttcaataagttcttttccttttttaacttcatctttattattattttccgaattaactacgtagacaacattgccggtaaactttgaaaataattgcgcatctgtaactgtgttcactggtggcgtatcgataattacaaagttataattcatcaataatgtgtcatacaaattcgcaaatgctcttgatgtgattaactctgatggatttggcggaatcggtccagacgtcaggacgtctaaatcttcaatttcagttgagataatactgtcttgataagttgaccaatttagcaataaacttgataggccttcattatttggcaaattaaaaatatagtgctgcgtaggtttacgcatatccccgtctacgattaatgttttatatcctgcttgtgcatatgcaactgctaaatttgctgcaattgtagacttacctgcgcctggtgcctctgaagtgattacaatgctttgaactgcactgtcaggatttgcaaacataatatttgatcttatgcctcgaaatttctcgctaataggtgactttggttgttcatggacaattaaacttgatgtacttcttcgtgtattcgtcatggtaattcctcgtaaattaaaatttttgtattgaacctaaaataggtaatcctagttgcgattcaacatcttcttccgtcttaatacgcttatctaataattcttttaagaaaataatcaatattgctaaaacaataccaacaatgatactgattactaagttaacagatactattggagatacttttacagcattatcatgtgctgaggaaagtattgtaacattatcaacactcataattttaggcatgtcatgtgcaaaaactttagatattctattaacaattttgtcagattcagatttattcccagttgtaactgatacagtaataatttgagagtttgtttgattggttacttttaaaaacgaattcaactcagctgttaaatacttaccatcaaactctctagatactttatctagaattcttggacttttgataatttccgtatatgtattaacagactgcaaactactttgaacattttggaaagctaaatcacttgaggactttttcatgtttactaatatttgagtagaagcagtatatttgtcaggcataacaaaaaaggttaatgccgcacttactacaagacatattgccggtaaaataagcaataatttaatattcttctttagaatatttaatagttttactaaatcaaacttttctttcatggtttcctccacataatcaatcattgtattcattatgtatgttttataaatcggacaattatatctagtttaacgaccacaaaaatacacaactacattttctctaattttttatataaatattttattgtttaaaattatatcatgattcttggtcgttatgtataatttatttatattttcgtttgagatataatattgtccaacttcaaatatccaaacctatcagtaataaacctagataccatcgtctctattatggctttcttataatcgagtagaagcagcatcattacttgattatttgctctttacaacaccgagcgtgcccgtactcggtaattcaatactttgcgtaacccgtcactgtgagttgggttaatgatgataaagcccacatcttttaaaaagatgtgggtaatttatataatttttatttacattttaaacttataaaaaaagcgcctatgtcatgatttaccatcacataggcgcttatcaataaattattaattattactttccatttcatctaatttatgcggatttcctgtaattagatgacaacttattcttttcaggggaacattacacttttataatatgttcaaagacaaacttaaccattcacaaatataaagaataatattatcaaatcattgaacaaatcgtattttgcaacaattgatatttatattaatgtattgtatttaatttataaaattcatatacatcttaatattctcaatttcgagttgtattgtcaactttatatagatttaaaaaaataatctcatgtctttttttacaaaagtaagttaattattacaaactagtaacaaaaattatttcttcaaaaatatatttagtagcgaatacacttcatctttgaattgacttttactttcttccactgctccaaatttttgcgaaaaggatgctttcaaataccaactttcaagaaacagcaatattaaattctgaaagtcttcttttgtcatctttatttttgattcatcatagaattttgctatctctttacttaatgattgatttaaatcttgtatttgtccgtaaatatttccagaaaattcctcaggcgtattagataattgaacatacattctaatatacctttcttcgatgtcgaaaataaactcaaataagaattgatataaagcatcaattgaatagttcgatttattttgattcatcataataatattattaaggtaatcaaaacaacatttaacactttgttcgtaaatactttttttcgagtcaaaatggtaatataaactcgctttttttatatttacacttttagctatatcatcaagtgttgtaccgtcataccccttctctgaaaataaggttattgcgttatcaataatcttatccttcaatttttaaaaccccctactgaaaattaatcacactatgttacaggaaaattaagttgcaattacaaatatttccgtttaattataacaacaatctattgcaaattaaaatactatcaattaccatatggcttacaacctaactaacgaaaggtaggtaaagaaattgcaattttttaactttttgcttttttatcctgtatttatgtctatttactggattgtcggttcaatttatttctattttactagagaaattagatattcattgaacaagaagcctgacataaatgtggatgaattagaaggcattacatttttacttgcctgttataacgaaagtgaaacgattgaagatacgttgtctaatgttcttgcactcaaatacgagaaaaaagaaattattatcattaatgatggaagttcagataatacagcagaactcatctataaaattaaagaaaataatgactttattttcgtcgatttacaagaaaacagaggtaaagccaatgcactcaatcaaggcattaaacaggcttcatatgattatgtaatgtgcttggatgcagatactatcgttgatcaagatgcaccatattatatgattgaaaatttcaaacatgatccaaaacttggtgcagttacaggtaatcctagaattcgaaataagagttctattttaggtaaaattcaaacgatagaatatgcaagtttaattggctgtattaagcgaagtcagacacttgctggcgcagtcaatactatttcgggtgtcttcactctatttaaaaaaagtgcagttgtcgacgttggctactgggatactgatatgattaccgaagatattgcagtttcttggaaattgcatttacgtggatatcgtattaagtatgaaccgcttgccatgtgttggatgttggttccagaaacattgggaggtctttggaagcaacgcgtgagatgggctcaagggggacacgaagtattactacgagacttttttagcacaatgaaaacgaaaaggtttcctttatatattttgatgtttgagcaaatcatctcaattttatgggtatatatagtgcttctatatttaggctatttgttcataacagcaaacttcttagactatacatttatgacatatagtttttcaatatttctactatcatcatttactatgacttttataaacgttattcaatttacagtcgcactctttattgatagtcgctacgagaaaaagaatatggctggactcatatttgtaagttggtatccgacagtatactggattattaacgcagcagtagttcttgtcgcatttccaaaagcattaaaacgtaagaaaggtggttacgcaacatggtcaagcccagacagagggaatacccaacgctaaaatcatcgctaaacattataagagaaacagcacttatcgctatatcgtgtgtcttttggatatattgtttagttgttctactcgtttatattggtactatatttgaaattcatgacgaaagtatcaatacaatacgtgttgctttaaacattgaaaatactgaaattttagatatatttgaaactatgggcattttcgcgattatcatttttgttttttttacaattagcatattgattcaaaaatggcagaaaggaagagaatcgtgaagtatagaaaattaataattttagtgttgagtatcttgatcatattgcctgtaagcacactggatggtcatcatattgcaaatgcagatgacgatccacctaaaaaactgaaatataaagaaaatagtgctctggcattaaattatcaccgtgtaagaaaagcgaattttctgaataatttcatttacttcttttctagtagtaaagaaattaaaaattatagtgttagccaatcacaatttgaatctcaaataaaatggctaaaatcacatgatgctaaatttttaactttgaaagaatttttatattacaagaaaaaaggtaagtttccaaaacgaagtgtatggattaactttgatgatatggatgaaactatttatgaaaatgcttatccaatcttaaaaaaatataaaataccggcaactgggtttattatcacaggtcatgttggggaagaaaactttcacaacctcgatatgattagtaaaaaagaactaaaagaaatgtataaaactgggttatgggaatttgaaacacatacccacgatatgcataacttatctaaaaataataagtcaaaattaatgaaagcttctgaagctacaatcataaaagatttaaacaaaagtgaaaaatatctaactaaaaactttaaaaagtcgcagaaaactatagcctatccttatggcttgatgaatgacgataaattaccggtaatcaaaaaagctgggttaaaatacggtttttcattagaggaaaaagcagtcactccgaactccaatgattattacatccctagaatattaattagtgatgatgcttttgagcatttaattaagagatgggacggattccatgaaaaagattagacttgagctcgtatatttacgtgccattatatgtgcaattattattgttacacatttattaacacaaattactttaaaacatgagaatatggaaggaggatctttagtactacagttctatattcgtaatattgtcatttttggtacaccttgctttattatcttgtcacagttactgacaaccttgaattaccaaaaagtcacctatagatacttaactacacgcgtaaaatatatattgattccttacatattaatgggtttgttttacagttatagtgaatcattattaactgacacaagttttcaaaaacaatttattgaaaatgtcctattaggtcaatggtatggctattttatcgttgttatcatgcaattctttattttgagttatatcatttttaaaattaactataacctattcaacagtaaaatattattattgttatcttttattttacagcaatcatttttatattactttacgaacaacacagcgtttcacgataccgtgctacactattatccattaagtgaaaacactataatattcggatggattttttatttctttttaggtgcatatatgggttataactacgaacgtgttttaaatttcttagaacgttatttagttattatgattgtattagctgtagctacttattttgtgtttattgcgttagcaaatggagactattggaacgttaccagcttttcatattcattaacaccatataatagtattatgtttattgttatcttgggtatttgcacgcattttaaaacaatgttatttaatacgattcaaatgattagtgctttctcattctttatttatttatttattacatccaatcattctagactcattgtttgcatatacaaatatatttgaggataatacaatggtctttctagcgatatcactactattcattttaggattatgtataggtgtcggtatgatattgcgtgaattctatatctttaggtttattattggaaaacaaccatataaattgaacattaatgcttattaattattaagctatgttaaaaacacgcggtgggcgaaatcagtttgaattgactgacttcgttttaccgcgtgtttaatattgttatacatatattctaattgcacatttaaactacgtaaatgccaatgggagtgggacagaaatgatattttcgcaaaatttatttcgtcgtcccaccccaacttgcattgtctgtagaaattgggaatccaatttctctttgttggggccccgccaacttgcattgcctgtagaatttgggaatccaatttctctttgttggggccccgccaaggtattacttgaataactcttttagaattctaaataatgatccgattaattgaaagaagtctgcagtcattattaattcctccctttactttataaattatgcttgcttagtatcagtcaccttttcagttttcactaaatcgtctgctaaatgatgccaaaaatcttgtaattcttctcttgtgcgcactgtatcagaactatcttgtccgacaaaatcaacatgatcccaatcatgttttgtaggcgttacttgccaaatgcctttttgaattttatccgtcgcatttgtataagcttgattaaatggatgttgagaagaaataacggatactaaaccatcgttttctcgccattctttttcagtagctttaccgattaagttaccagtaatcacaaatgggaaaaacatatttaagtctgctttttgtctatcgctatttaatgctttgtgcgttgcttcaccagtgtatgttttatacacaatgttagggttcaacgacgttttacgatttaaatctgttgcaccctcacgcgtcagatcgtaaaatccattatcttttgatttccataaattagattgtttaacgcgtttgacataatcaatatatgattcatttggcttctgttttagaccccattgagccaacccgaagtctactcttgaatttttattaccaaacattttaccgatatcaaatacaatttgtctcactaaagcttcattaccagctaaatctgaagcatgcgttccattatgtggcgttcctaaagtagtaattgatgaaatcatattgtcattattacctttgaatagtggagaaatttcgccaccatgtttcttttgatactctatttcttcacgactaccattacgcagtaattcttctagttgacgtatcgtttgaccacccatactatgtccaacaaggtgtaccttctgtcctggtttccagtctttgtaaattccttcgtatgtttttccataacgttcatgtccatattttgctgcatgtgctgcaccataatctacacgaccgcctttgatataataataaagttcaactgcgcggtcatagttacttccaaaagcacttatacttgcttcataagctttgtaaccattttcttctaaatcttggcgaatgttcattttattaccgccccaataatgagctaacactgaaggattaatatcatctgtaaacccattgaaaccatgcactaaaacgataggatcttgatttttatactgcccttgtttggcaactttattcgtttgatcacctttcgcttttgcagtaagttcctttgtccctttgtttggtaacgttgctactgcactactttttaataaatttaatccatttttcttgtcattgtcctttgttggttcaactggtgatttttgattgttttttaaatctgaaactgatagtgttttttcgtctttttgaggtttcacttcttgttcattgttaaaattgtggtcagtaattttatcattcgcttgattcttttgttgcggttgtactttctctatttctgtctcattaacaatttctcgttgacttgtttgatctgacttatttaatgatggtgatacctttgttcgactttgtgaaggtagattgttattagcgtttaagtcttgactattatctgcctcttttgactgttgctgtgacgccactttactttgtttgccatcattaatagcctgttctaacccttgatttacatccctaggattagcattgttattttttgttgtatcacgttgaatatttttattattaagcgatgattttttatcatcctttagttgatctttattcaaatcatctgttttacgatgattttcttctgatattgttttatcattatgcaagttcttagttaaattttcagtatgttgctgttcgtcaacaccgttttcacgttgataattagcattttccctagtttgttgatccccaatagattgtgctgtaactgtatcctcctgtgaatttcccatattcacttgcttctcagctgcttgtgcttgtccaccacttaaaaatagtaatgtagctattaaaatggaagatgcacctacactaaatttacgaatactatacttattttgacttttcatcattgtcagcacctctatttttttattttagataaacaaattgataattattcgaggaataaactcaaataatttacttaaccaagcactcataatgaccatcctttctattgtttaatttgatgagaaagcgtttacatttttatttaaaaaatatattctccaaagagaatttaaagtgtatacgctaaccatttcaaattattaattaatattatatttggcaaaatttaattagtcaataattagacacaatttaattatgcaaattgtaacttttttacatatatcttttgtgatttttaatatttacatgcttgggtcttgattccaatgatgtattatttttttagattagctgtatggggagatttatgagctatcacagttataatgtttgctggtgttgtattttaaacctaaaaatatcatttcttctacaatgattgtattaggataagccattacgcttgttcctacattaaatatatacagttaattttcttccctcaaagtaagtatcctactatttttaatttattgtttaattactattgaactacctttaacttaatctcgaatttatgatgattagcataaaaatacaccccataaagttagttttttagtccaactttcgggatgcacatcttagttctaatggagattgtcttttaaataggctatgacatttctatttcaggctagatatatttttattcacagtataaatacaaagaatataaagacaactatgatattaataggtagtaacgacaaacataactttttagctttttcgccatttttcccttcataacttcattatatcgattcatatacttttcaacatctttaacagtgacatctattcctgagttgctcaattcacttttcaaattatctttggtttcgtatcgtgattatccactagttatctataacgagttcgcaactttagtaccatcacagcattcatagttaaaatatgttggtgtcgtattttaaacttgaaaatgtcacgtttcccacaatatttgtaagtgtataagccatgatccttttctctatatctcagtccatacttgctttaccactgttcgatattttgtcgttcgcctttaaagttattgcgcttatgatgtctacgcgctaattctgcctcaatttctgaaaaatcaacgcctagcgcatgcatcaagacaaataaatgataaagttcatctgctacttcacttacaaatgcttttttgtcacctttaattgcttcgattacgacttcaaaagcttcttcaccgtatttttttgtaatcttttctataccttctgttaataaatatttcgtatatgacttttcattattggattgggcactatcttgaactgtctgcgctaatgtttgtactgaaaatggaacttctgtgttgaaacaactttgactgcctgtatgacatgttggtccatttggtatgacatcaattaaaatagtgtcattatcgcaatctacatgaatatctttaacacgttgcgtatgaccagatgtttcaccttttgtccataggcgttgtttcgaccgcgaatagaaacataccacaccatcttctatcgttttatcaaaagcttcttgattcatataacctaacatcaatacttgttttgtttgattatcttgtaaaattgctggcactaaacctttgctaaaatcaattttgtaattggtcatcttactgctatacccccttgccgtatcgcttctttaatagattgaaccgtcgtttctcggtcatgtaatatacttgcagctaaacctgcagaaacatccgtctgatcaaataattctacaaagtgttgtgcattgccaccaccaccagaagcaatgattggaatatttacaagggattttatttttgcaagatgctcaatatcaaagccttgtttcataccatcatgccccatacttgtaacgaggagctcacctgcacctaactgttctacttgctgtacccagtcatatactttaatatttgtcaattttttaccgccatgcgtacaacaataatgtgcttttctttcaggatcataatagctatcaattgctatgcagatgcattgtctaccgaatttatcactcgcttgtttaattagctgtggattttttaaagcacttgaatttaatgatactttatctgcaccatgatttaacaattgggtaatatcatcaaggctttgaatcccaccccctacagtaagagggataaacaagcgtgacgctgtctgttcaatcacttctagcattaagctatgaccctcttccgtcttagagatgtctaaaaatactaactcatcagcacccgcttcattgtaatacattgctaaatcaacaggattcccaatatcccttaatcctttaaattgaatccctttaacgacacgaccatctttgacatctaaacatggaatgatacgttttttaatcattttagcccctcccaaaatgatgcttgatgtgcagcctttcctataatagcagcgtgaacatttagcgacgctaatcgttgaatatcttgctgatgtctaataccaccagacgcgatgacaggaatcgtcgttgcctttactaattgaccagttaattcaaagttaggtccggacattttgccatctttagcgatatcagtataaataatgcctccaataggtatatccgataactgtttcacaaaactaaataaattcaactctgtgtcctcttcccatccgttcactttaatatcttctccataagcatcaacagataaataaatgcgacctggaaatgtatgtgccatctctttaagccattctgtatcttgaatacctttcgttccaactatgcaataattaattcctgcggcaaagtagtccatgatttgtgacttcgtgcgaatgccaccacctacttcaatatctttggttgttaatctcctcaatgacttaatataatcaaactctcgggcatgctgtgccttagcacctatcaagtcgacgatatgaatacgattcacacattcaaattgactatagtaagcaatactttcttcagccgaacgcgacattttttcttcactatcatatttaccctctgttaacctcacacttgttgacccaatcaaatcaatcgctggccataattcaatcatttataaatcccccttgtattgcctgacgcaaaatttgtaacccatatgtaccgcttttttcaggatggaattgaataccaatataattgttaaattgaacaattgctggaatatcagtcccatactgcgcatatgcaatgacattttctgacatcggcgcttggtaagaacgtacgaagtaaacatcttgatttaacataggatgcttactcactaaattattccaacctaagtgcggcactgggtattctgtttggatacgcgaaatatttcctgggataaaccctaatccagatgcatcgccttcatcactatgctcatacattaattgcatgcctaaacaaataccgatcattttcttatcagtattcttagccaatattgcatcgagatttaatcgctttatctctgacatcgcatctttaaaatgaccgacacccggtaatatgattgtttctgcttgatcgattatattttgcttatttgagacaaccacctcataccccaaatgttcaatagcacgttttacattactaatattccctaatccataatcaacgatgacaatcattcaatcacacctttcgatgacggcacacgctgatcatcagttgcagttagcgctatgcctaatgcacgggaaaatgctttgaatatagcttcaatttcatggtgtgtattacctccacgaattaaatcaatatgcgttgttaatcttgcattgattacgactgctctaaaaaattcttctactaactccgtatcaaacgtaccaactttttctttacttaacgttgcattgaaagataagtatgggcgcccacttatatccacaacgacacgtgctaatgtttcatccattgaaatgtacatcgttccataacgaacgaaatgctttttatctttaatcatttcaagtaacaattggccaataacaatgccgatatcttcagttacatggtgatcatctacatcgatatcaccttgtgcctcgatgtttaacgatagtccactatgaaacgtaaacaaggttaacatatgatttaaaaagcccacacctgtattaatatgcgatggtgactggtcatctgatattgaaatatttagttgtgtttcagctgtgtttcgttgtttttgataaatcatattttgcactccattctttaacaatttcttctaattgctttaactgtgatgctgttgcaattgaatatcttacatagcccttcatcaccggctcatcataaaaacgaggtttaaatccttgttcatatacgtattgtcctaattgttgcgccgctgaacctttagtaagtacaaaattagcatttgatgggaatactgacattttatctgcaacatgtgtatcaaatatttgttttaactgctcagctaactgtcgttgcattgttaaaaatcgacttgtctcttctctatgtctaaaaatataagtcgcaatatttagcgtaaatacatttaatggatatggatgttctattgtttgaatacgctgtatcgtttcaacagtactcattaatacacccaaccttaagccggcaattccaaacgcctttgataatgtgcgcattcttaaaatgtgtggtgccatttcaacatcatatgccttgccataatctaaatatgcttcatcaatgacaaagtatccatttattgctttcatcttatctgcaatagctgttaaaaatgccgtatcaaattgcttgcctgaagggttatgtggattactcataataaaaaatgatggttgtacttcatcgattttcgttaaaatggtttccaaatcaaacgttaaatctgatcttgcatctacaaatgcaatttcacgatttacttgtgccgcatatgcttgatacataaaaaaatctggatttagcgttaataccggaccttctggcatgatcagcattaacttttgaatcaattcatcagagccatttcctgcaataatttgttcaggcgataatccgtaaaacttagcataagcttccttgaattgttcatatgctgcatcaggatataaattatatggcgttgcactaataatagacgtcattgttttttgatccaacggcgtaactggactttcatttttatcaatataaatcatttcatttacactcccctaagactgacgtattaaaatagactgttggtgattgtataatgcttcaacatgagcaatatgttgtgctgaatcagcaatttgatcaaatgtatcttttgataaatgaatgaccgtgttccgtgttaagaaatcattgaccgataacccattggtaaatctagctgttctatttgtaggtaatacatgactaggtccagcgacataatcacctatgacctctggcgaataatgtccaataaacaatgcgcccacatatttcactttttcaatatatggttgaggatttactgtttgaatcgacgcatgttcaggcgcgattgtattcataacgtggcatgcttcatcaaaattactagcatggataaggtagtgttgattagcgatacttttagaaacaatgtcgtatctgtccacattaggcaatgctttagcaatacgtgattctaaatctttaaggacttgcgcatcttcactaatgacatatgtacgtgctaattcatcatgttctgcttgcgcaaatacatcatatacgatggcatctaaatctgcggtgtcatcaataatcagtgctatttctgttggtcctgcaatttgatcaatacctacctgtccaaataaatattttttggcatatgcaacaaattggttacctggacctacaatcttatcaactttaggtatcgtttctgttccataagtcaatgcagcaatactttgagcaccaccaacttgaaacacttgattaacttgcgtaatataacatgcagctaatacctcttgggatactccgttaggttgaggtggtgtcacaacaacaatattttctacacccgctacttgtgctaaagtcgctgtcattagaaccgttgatggataacttgctttgccaccaggcacataaatacccacactttctagtggatggtatatttcatagcactccactgattcttctaactgttgattcatctgcttaatactttcttgatatgctttaattctttcataactttgttgtaatgcttgttttgttttttcatctaatgtgtcaaatgctgctttaatttgttcatgactaatttctaaatgatctgttttcgtatgatcgaatgttagattatacattttcaaagccttatctccatgaactttaacttcctgacaaatatcgcgaataattggatacaatgactcatctaatggtgcttctaatgaaaattgatttaaaaattgttgtgcattaagcattggcaatagacacctccaaagagcgaataaattgctctattaattgtgattttttaaaataagctgctttattagttattaaccttgcattgatatcactaatatgttgcttttcaaccagtccgttcgcttttagcgtagtacctgtttgaacgatgtcgacaattccgtctaccatatcgacgacacaagctaattcaacagaaccattcaatttaatcaattcgacatcaatgccttttgatttaaaatatgtttcagcagtatgaacataactcgttgcgattttacgataattggtcgtttcaggtttcgctgcaaccgcaaaatgacatgctccaaaaggcatattcaacaaattattaacattgtaatgacgctcatctaaaatgtcgctaccaacgataccaatatctgcaattccttgttccacatagattggcacgtcactcccttttactaaaatgcattctatattatctacacttaataataattggcgttctctattttttaatgtttctgataatgtcgtaaattcaattgcatctaaatagttaattaaactatccattagacgcccttttgctatggcgattcttaacattgtgcatactcccttacttaaagtgttaatcctaatccaaacccttcgatgcttcctttgtaataaccacctgttaaaactcgagattcattttcagcaaaatgacattgaataaataaacctgtgtaataggatctaggtggctgcgcagtaatatctaaatggatgtctttgtaaccttgtgtatgtaaccaacgttcccatatttttaattcaacgagtgctggatggtcatttggaatatagtgttccaatacatttaattgttgttgcgtattctctttcaagatttgcacgattggatgttcagtcgacaaatatgtaaccaatcccgataaattacgttcctcaatcattgatagtatgtctggtgtttgtaacgatttatcgagtaacgcatcaagcaattgataatgtcccaatacaacaaaatgcacgttgtctctcaactgctgttgaataaactgaataaatagctttaagctctgttgtacattcgctaatgatggtgcatagttttccaaaccaacttgtacagccgcttcattattccgaatgattaaacctgtgtatgccacttttgttgctgcagttggatacattgagtaataacgcaataattgatctgtaaaatcatttcgaagtgcataaatttgatgctcatgttgccaaaaatttcgctcacccatctgctgcaaatcctcatggttcaattgtttccagtccaacttttcaaccaaactaaaatcaactaactcataatctgctttattaaaatattttaaaaatgctgtttccgattcttttaacgcaattaattgttctgaattattcactcgaccaccctttactttcaatactgtatttaaaatcacctggtatttttgttgttcactttacttctctaccatactaaagtgtaatatgcttaataacttatcatttttagcaatacattacaacatttttcagaaaattcggtgtattggttttaaattttttcaaaagaaaaaggcaagacatttgtgcctataaaaatgcttaaccaagatttttatattgaagttgtacttcttgcacatattgtccttgccttattatgtaaagttattttctttctatctttttattaaatttaactattcttcataatcccgattacctttaaagaattgtctatcttgtttactatatacattttcaggattaaaaaacggtttgagtttatatttaaattcaaataagtttagaccatcaatcgcaaccctatcttggtaaacgttcgttgctgatatatctgtaaaattgtttggaccgacacctgcaataaatttaaagcctgctttatcgaccaaataatcatacgcttgtgtatgtctatcctgtgcgccatgtggaaatacaaacatatctgttttacctacaattggttcaacttcatctttccatcttttagtatcacgtttaataccatctaaagatgttttttcaaaattaatgtgaccatatgaatgactcgcaaatgaccatccatcccgtttcattgcgcgaacaacttcctcagctgcctttttattctttgtataatctttactcgttaattcattcgtgcgatatcctaatacaccctcataaccggttaaagcaacaacacctttttcaccatttaaagaaaaatctggatgctcttttacaaatttatttaaaattggcacgatatcattgtcatcagaataagtagcatggccttttgagtctgtcgtttcagatacaacatgcttatttttatcaagtactaagcggtcagcataaccatggtgtctcatgtaactatagtaattcatatcatcaattgagatgattagcggctttttacctttcggcaattttacttttttggcttttacatgatgagatgataagtcgtatacatcatgtggattaacgatgatgtaattatttttatataattcgttcaatgattttttaaattcacttacagtaatcatccaatcattgttgcccttagcttggtgtgtatctcctgtaaacgcaacttttgggtctgtaattaatggatgataaaacacatgataaacttggccgtgatatgtttcccaatgttcatccattttcgatttatgcattgcatactcatttggattaacagatttattttgagctttctcattttgcttggaacagctatataacaatgcaactgataataacagaaaaaatagcaataaatattttttatgcattaaacattctccctatgttttattatgcacaattataacatttttattatgtggctcataactttttaagaaactgttgggattttaattttattttttagataatgtcatagtattttatttataaaacacaatatctccttgattgataatgtcgtccattgtatcgtctcgcttgaaattaagtctttctgctaaatttattgaacgttggttacacttatttgtcctgataacttttactgtttcttgatcgatataattcacaaaatttgtgattgctgtaatagcctcacatgcgtacccttgtccttcaaaacttggatgtaatttataaaataaatttaatactgtttcttgctttaattgtcgatattcatatccacaaataccaataacactacaatctatttttttcaccaatacaaagtaaccaaattgatattgttgccaatggttttgccatttttcaatccaccgttgtgtgtctaatttggaattatgtaaacctttgggagtgtatatatttgcttgtggatgactacaaatattataaagatcaattaaatgcgaggaacttggaatcattaaatttaatctttcagtatttatcattaaatgtctccctcctatttctatttaaagactatttatatgaatactaatgccacgggttgaaatatcgactattatttaaaaagaataatgtaactactaacatcagaagtattaacgtcaaacacaaaacaacataatcatctttttttaattgttttttgacgtaccaggttctccttttatactgtccgaattgtcttaactccatagcagtactaatagtgtcaattctttcgatactagaaaatattaaaggtaacacaatgcgtttgatacctttaacacggctagtaaatttcgcctttttcgaattatcatatcctcttgcttgttgcgcttgtgaaatattaaaatatgtttcttgaatatctggaatataccttaatgctagtgatactgcataactgattttataattcacacctagctgatttaaacttgcagcaaaatgactcggattcgttgtgaataaaaatattaacgctaaaggaactgtactaatatattttaatattagattaaacagatagaataattcctgtgatgttagcgtaaatcgaccaataccattgattaactctgtacgctgattataaatcttcacaccatattcaggatcaaatatatatacggcaataatatttaatattgtgaaaaacagaataaatttaacaacaaaacgaacttgtttccattcaatatgagcatatttgaacaataaaatagatgaaacactaattaaaattaaatatcttgtgtcataagtcaccattgcagaaatagaaacaactaataagaataaaagtttaacagtcgcatttaattgatgaatacgactatttcccgggtgaaaacctatagtattatattgattcattggcgtctcaccttcctatcatggttaataaataattgtattaatttctgtggctcgctaatccctatatattcggccatttcaaatagcgatgtttgtctcaatgatgcaatctcacagatttttttatcatttaaaaccaatactggcgtggtatcagcaacgacttgaccttttgataatacaactgttcttgaactatactcagacaataaatgcatatcatgcgtaatcataataatcgtcttcccctgtctgtttagctcaattaaaaatgacattatctcattataatgatagaaatcttgaccagcagtcggttcatccaatatgattatttccggatttaagactaaaacagatgctatagtgaccctctttttttgaccatagcttaaagctgcaattggccaattccgaaatgcataaagtccgcatattttgagcacattctctactcgtatctttatatctgattctttcatacctcgtgctcttaaccctaatgctacttcatcgtaaatcattttttcggaaatcatatgatttggattttgcatcacataacctatgaattcagatcgttcgctaattgacaattgattaaatcccttattacaaaattggatattacctgttatatctaaaaatccacaaattgctttagcaagtgttgatttgccggcaccattgtgaccaactatactaagcatttctcttctataaacatttaattgaacattattaagtacactattactatagtcactatattgaacacacacctcatttaattctaatagcggttcagatttgtacttattatcatcatttgaagatgttttatctatccattttttcactttaaatttaacatgttcactcatacaaacttcacgtaaattcgctaagttatcaatggattcaacatctacttctgcatatttaagcgctgtacagtataatggttcacgtattcctgcttctttaagcttagatgattttagcaaatcactagacgttgtattagcgatgatttttccatctttaaaaagaagaactctatcaaacgtatcatctaatgattcttctaatcgatgttcgacaataatcatcgttgactttgtttcttcatgaatattatttaacaatctcagcgtttcatgtcctgtcgcaggatctaaattggccagtggctcatccaatattaaaataggggtacgatggattaatataccacctaatgaaacgcgttgtttttgacccccagataaatcttgcggtcggtgatttaaatgttctatcatatcaactttttcagcccaataactcacgtttttcttcatatcatcttgttcaacacaattattttctaataaaaaggccatatcttcagctgctgttaagcctatgaactgtccatctgtatcttgtaaaactgtaccaacaacattagatcttttatgtaaacaactaacagttgcatcttgattatttatatgtagttccccagttacgttacctttagttttaaatggaattaatccatttatgcaatttgcaaaagtcgatttaccactacccgaagcaccaactactaatactttttctcccggataaatatcaacatttatattctgtaatgtaggtgttgcttgactatgatattgaaaactaaagtctttgaacgagataattggttcagtcatgatatatcattacctttctacattcatttacatatctgattcaacaaaataattattctttacgtaaactacctttttttatttgagatgaagcatatgcttttaataatattgtcccaataatgccaactgaaataatatttaatactgcagagataacaccttgtgtataaaccttgttagctggttcgttataaatcaaaatatctaatgttggtgcaataagtgcccagcaaataatattcgcaataatttgaccggtattaaaataaatcatcgacttcctagaaaatcgtcctgaagaaagatttaattttaggccaatccatccatataaacagcctataattcccgagcaaataacccaactccaccaggcactaccgtatgtagtgaaatctttaatagcgtgaccaattaatccagtcattaaaccagcaaaaggtccaaatattgcagatattaatgctaaaaatgcataagatgtttctatattcgtattaggaaaccctgttggtattacaacaaaacgccctaaaattacaaagaccgctgctcctataccaattgcaacaacagttttaactgaaatatcttgttttttcatcttcattactcctcacataaaaaattcattaaatcgatggtgctttagataaatgaatcgtccaatcatttccagtaccaatatgatataaatctgaaaatgagtcttgattgaccgctacaccaatatttactagcgagttaacatacacaagaggttcacccacattaacatctgcaaacgatcgcgcaaatttaataatattttgatagactttcttatcttgatgataaattgttaccaccaaattattgccatgaacaatttccaaggattttaagaatgccaatggaatatttgtccataatgacccaaatctgatatctaaaatatcaatacttcctgtaacagaatcctcattttttgtcgcttcacttatttctaatgcctcaatactatcaacattaattgcctgaccgagacgttcaaacgctatcttatttgcagctaatctcgctccattgtatgcataaacatctctaccatgaaaagtatgactttcttccgaatgaggcaatcggcttttcacttcatcaatttcgataacttttttaataccttcataatgtttgatatgacttaaagagccattatcaggtgtaataatgtaatgacctgaatatgttaagcaagcaatgctccgcctatcactacctacacccgggtctaccactgatacaaaaactgtgcctttaggccagtattttacagtttgatataaacgatatgacgctacccaaatgtcatacggtggtatatcatgcgttaagttttcgacacgtatatcatcacttacagtatatgcaactccatacattgcacttacagcgccatcactaagtccaaaatctgattgcaataccaaataatttcccataaaatgcctcctttttttaaaacttcaaaaaatattatctacatatttaaggttatatattttgaattttcagaattatattaaaatagtacgagtcacttgttacaaagtcaatagtagcgactataaaaatgataataatagtcagatttatctcattaactaaatttattgaacgttggttacacttatttatgtttgaattaattgactagggtataacaatagtgtggtgttttatagatatgtcttttatatgcatcataaaaaaatattcgaattcgaaataaaatgcttgcatctttgtttttcaagtggtatcgtatgtatatcaagtataaaaaatatatctaagagataaaaatatggaggttttatattatgacaaactttacttttgatggtgcacacagtagtttagagttccaaattaaacatttaatggtttctaaagtgaaaggttcattcgatcaatttgatgtcgctgttgaaggagatattaatgacttcagcactttaaaagctactgcaacaattattccaagctcaattaacactaaaaacgaagcacgtgataaccacttaaaatctggtgatttctttggtactgatgaatttgataaaatcacttttgtgacaaaatcaattacagaaagcaaagttgtaggtgatttaacaattaaaggtatcactaacgaagaaacattcgacgttgagtttaacggcgtaagtaaaaatcctatggatggttctcaagtaacaggtattattgttactggtataatcaacagagaaaaatatggcattaactttaaccaaacacttgaaactggtggagtaatgctaggtaaagatgttaaattcgaagcatcagctgaattctcaatctcagaataacctcatctcataatcctcattgattttaatatatacgaaatgccaactatatcatccctaggtatagttggcatttttctttaatttatgattcactattttaacatttaaacttatattaagacgcccttcattcaggcagatcttattgaaactgataacttttatgcccttttgcaaagccattaaccgtataaagcatagatcctccgtccatttctatatcattggaacaaatgatgagttgatttgtgccaggtataaattgcggatgcgtagaacgtaacatatgcccttcatctcggcttggtatcaatatttgtcctattggataaccccttttattaaaaactaacactcgaccttgaccatacattgctacgtataaattatcgtcactatcgatacaacatgagtctggtccttcatgacctgtaaaatagtacggtatggtagctccaaatggttgtatcgtcacaccatcatcttcaagtgcaatgcgatgtaatcgattggctgtagtttctgttacccatagtactttttcatctgtacttaaagcaataccatttgctacgctaatattttgaataatcggcgtcactgttttaaagtctggcgtaacataataaacgcctcctagtgggttggtagagtatcctctaaaatctgtaaaataaaacccacctttagaatcaaataccatgtcatcaatacaatattctgttgatagatcttcaatgatatcttgtatgttgtcaccattttctgtcgctgcaaaaatgcctcctgtagatttaaaatctcctaaataacaaataaataatcggccatctttatgtattttgattgctgcaggatttgctttatggcttacaaaaggccgcttaatttctttagtttctggatttactttaaaaatatttccttcgaatacatccaataaaaagagttgtccctgccgatcaaagttcaatccttctagttgcaatcctttcttggaaatttcaagccatggttcagctgtaattgtttgtaattcactttcagatataattggaacagcactattagacttcccgctataaaataatgtaggtaaatcttgttgtgacatcatgatcattcctttcatttcattcgttttaactatcattttcattttaaacaaggtaactatcaaatcaaatgataacgttttcatttatctattttatcggtctagtggctgatttcaagctagaaatattgaatgacaatacaactctgttaaaatgatggacgtagacaaatatgcgtattgacgctttattttaaaaattaacatgcttataacatgtttttagaaggagattaacctatgaactatcaagttcttttatattataaatatacgacgattgatgaccctgaacagtttgctcaggatcacttagccttttgtaaagcacaccatttaaaaggtagaattcttgtttctacagaaggtattaacggcacattatctggtacaaaagaagaaaccgaacaatatatggcacatatgcatgccgatgaacgattcaaagatatggtgtttaaaattgatgaagctgaaggacatgcttttaagaaaatgcatgtacgtcctcgaaaagagattgttgctttagatttagaagaagacgtcgatccaagacacacaactggccaatatttatcacctgtagaatttagaaaagctcttgaagatgatgacacagtcattattgatgcacgtaatgattatgaatttgatttaggtcatttccgaggtgcaattcgtccaaatatcacgcgctttagagatttgcctgactggattaaagagaataaagcgttatttgcagataaaaaagtggttacgtactgtactggtggcattcgatgtgaaaaattttctggctggttattaaaagaaggtttcgaagatgtagcgcagcttcacggcggtatagctacatatggtaaagaccctgaaacaaaaggtcaatattgggacggtaaaatgtatgtatttgatgatcgtatcagtgttgatatcaaccaagttgaaaaaacgattattggtaaggattggtttgatggcaaaccatgtgaacgttatattaattgcgctaacccagaatgtaataaacaaatattagtttctgaagaaaacgaagctaaatatttaggtgcatgctcttatgattgtgctaaacatgagcgtaatcgttatgttcaagcaaataatattagtggtaatgagtggcaacaacgtttaacaaactttgatgatttacatcaacatgcttagtattaattaaatacctttcaaaacacgctttgaaaatccgatttataaaggtttttcaaggctgtttttttatgcgcatgcataacctgatatgtttttaattatgcgcatgttatactaaattaaattttaatactgcggggtgtcttaaaatgcacattttagtaacagggttcgcgccttttgacaatcaagatattaatccttcttgggaagctgtgactcaactagaaaatattattggcacacatacaatcgataaattaaaactaccaacctcttttaagaaagtagatactattataaataaaacgttggcatctaatcattatgatgttgtactagctataggacaagatggtggtagaaatgccattaccccagaacgtgtcgccattaatattgatgatgcacgtattccagataatgatgattttcaacctattgatcaagccattcatttagacggtgcgccagcttatttttcaaatttaccagttaaagcaatgactcaaagtattattaaccaaggacttcctggagcactttcaaatagtgcaggtacgttcgtatgtaatcacgtactttatcacttaggttatttacaagataagcattaccctcaccttcgattcggttttattcatgtgccatatataccagagcaagtcgttggtaaacccgatacaccatctatgccattagaaaagatagttgcaggtttgactgcagctattgaagctatttctaatgatgaggatttacacctagccctaggcacaacgcaatagttataaatgcacaaacaaaatacattccttaaatgactaacaaatttgttaatagggtaatacttacggaagtatgttttatttatgggggcggaattaataatgactacaaaaacagtatttgatgtcattgatatgggtttaggatatttagtaaatgtgtatgatacttggaaagttgaaaaggtacttgatgattatcataagcctttttctaataccattcattggcaatttgggcatgtattaacaatttttgaatcagccttagctgttgctggtaaagagaatattgatttaaatatatatagacctttattcggaaatggttcgtctccagatgaatggaaggatgaagtaccgagtattgaaacgattttagaaagtctccaaacattacctgaacgtgcacgaaatctaactgaagatgatttagcaattgaattgaaacaaccaattgtcggttgtaataacttagaagagttattagtattaaatgccattcacatcccacttcatgctggtaaaattgaagagatgtctcgtatattaaaaaattttaaataaatatgtgcttattaaccgttaacaacacgttaacggatttttttattttttaaaaggccactcttagtctgcttacatacagattaaaagtgacctattaatatcatgtattatacatagaactaagaatagccttatctataaaaataattataatggtttatgagttaaatctttttcttaaaattaaatacaatcccaatatacctataaatacccatgtaatccatgaagttataatcttcataccagtttttggtaattcttttagaggattttcaggtttggttttattatctttaggttgatcatccttatccacttttgatggcttatctgggggagttggtttaactttattagaatgatcaggtttagttggtggtgttttgtcttttggtttttcaggatagattggtttattcggtttttctggcgtatatttattcgtcacaatcaagttgcccatatcattgttatccacatgcgttgtatagccattaacttttgttaattcctcgactgtgtattttacttgttgaccttttgctttttcatctaatcctgtccacgtatgtgtccagttattagattcatttaatgttgctgtttttcctgttgcttttccatcttgatataactcaactttgatttcagttggtcgttttccgtcttggttattattgtcatcccaattttttgttactgttgccgatgtctctcctggtgtatacttgttcgttattgtcgtaccgttgatgtctgttgtgtagtcttttacgtgatcttcggtcactgtatattctattttctttccttcatcatacttcggtaagtttttaaattcgtacttccagtttgtttcagatgtcacgtctaacgtttttactttctctccgttagccaataaattcacactgactttttctggtctcttaccatcttgattgtctttgtcgtcccatactttttcaccactaattgatgttgtttctggcgtatatttattcgtcacaatcaagttgcccatatcattgttatccacatgtgttgtatagcctttaacttttgttaattcctcgactgtgtattttacttgttgaccttttgctttttcatctaatcctgtccacgtatgggtccagttattagattcatttaatgttgccgtttttactgttgcttttccatcttgatataactcaactttgatttcagttggtcgttttccgtcttggttattattgtcatcccaattttttgttactgttgccgatgtctctcctggtgtatacttgttcgttattgtcgtaccgttgatgtctgttgtgtagtcttttacgtgatcttcggtcactgtatattctattttctttccttcatcatacttcggtaagtctttaaattcgtacttccagtttgtttcagatgtcacgtctaacgtttttactttctctccgttagccaataaattcacactgactttttctggtctcttaccatcttgattgtctttgtcgtcccatactttttcaccgctaattgatgttgtttctggcgtatatttattcgtcacaatcaagttacccatatcattgttatccacatgtgttgtataacctttgacctttgttaattcctcgactgtgtattttacttgttgaccttttgctttttcatctaatcctgtccacgtatgtgtccagttattagattcatttaatgttgccgtttttcctgttgcttttccatcttgatataactcaactttgatttcagttggtcgttttccgtcttggttattattgtcatcccaatttttcgttactgttgccgatgtctctcctggtgtatacttgttcgttattgtcgtaccgttgatgtctgttgtgtagtcttttacgtgatcttcggtcactgtatattctattttctttccttcatcatacttcggtaagtctttaaatttgtacttccagtttgtttcagatgttacatctaccgtttctactttctctccattagccaataaatttacactgactttttctggtctcttaccatcttgattgtctttgtcgtcccatactttttcaccactaattgatgttgtttcgattggtttttcagtattagtaaccactaaaccatcttcttttttagtatatccttctggtgttgtatctttaccttgagcatttacttctttaactaaatatttaatagtcttgccatttttgtcattttccggaagattagaccatgtcacttttgtcgttccatcttctaattttttaatttctgctttgtctactggtgttgtgttttgattgtcatcttgtttgtacaacttgaaataaatcgttggtttcactttttgagtgccttcccaaaccttttgagcagaaacatcttttgttttttctatctcttttgcattttcaatagtcgtaaaatatccctgattatctgtatctttcatagtaaacggatattctttatccttatcaaatgtatacggtgctggcgcctctatttcttttaaaatatagtctccgctaggcaacgctttaatattagcaataccgtttgcatctgttttaatctcaatttctttttgattgtcctttacaactgatccatcttttttagaaagtttaaattttacattagctataggagccttggtatctttatcctgttttaaaacttttaattcaccttttacagtaccttcaataccggcattagcattaatattatgcacagtatgattaaatgctttcccgttcacttcttccttaccatgctcttgataccaagcttgtgaattattaacaaactctttttgctgttcattcgtaattttggttttgtagttaattgaaaaactattaagtgacccatagccttgtggaattgttacatcaattgtgttcttcgtattatcaacagttattttagaacctggaaaggctttttcaaaatcagtaattgcatttggtccactataataattgctatgtgtacctgtcacattaatgtttaatgtgcttaaatctaactgctgtccaccttgaatctgatcctttatagtaatatctttcgatacatatcttttttcattattaatatttaaaaaccatcgtacatgtgtcgtatcttctggcagcatatctcccgttttataatagaaaacactacttgttcccgcttcacttttatgaaccgtaacattcgttgatttattcccagatgttatcgtagctactttgtcatctgaagtatttgtttgcgttaaatttcttccttgtacttcaaattctgcaaatcccgaaacatcacttaatttttctactttatcattgaatgtaattgttgctccgtctggcgtaataactgcttgacccacctgttcacctttaacagttaatgatactgttttgctataaccctctatctttactgtaccacttgtcggccatgccactttaatcgtgtcaccattttgtatttttccatttttatcgtcgaacgtcatttttactgtcgttttaccaccatcttctatcttagacggtgatacagttaaatctgtaacattcgttgatgaaatatctcgtgctgcaaatgcttcatttttattaaataaaggtgtgatgatatttaataacattataaagaccataaacttcaacacatttttgttcataaaaacccctccttatactctatgtcatatccacaggatactaataataaattataaactaatttagttcttattcaatgaaatttatcaaaaattcatattattattttattatgcaaaatatatacagtataacgaatacaagtgcatgaagttaacttgtatcaattaatttcttagtatattagttcattttcaaaatcttttaaatttaataaacaccaactataccagttcttcactgcttctcgaaaaataattatattaatgatttcgttaatttaattttatatttaattattactgtacatcttttgtagttagctttattcttaaattgaaatatgtataaaacatagaaagaaggacgttttaacatggaaaacacggttaaatatcgtaagtttatactccctatcgttgtaggtctcctaatttgggcacttacaccttttaaaccggatactgtggatccaacagcatggtatatgttcgcaatattcgtcgcgacaatcattgcttgtattacacaaccgatgccaattggggctgtctctataattggatttacaatcatggtactcgttggcattgttgacatgaaaacggctgtcgctggttttggtaataatagcatttggttaattgctatggcctttttcatttcaagaggatttgtgaaaacaggtcttggtagacgtatcgcacttcatttcgtcaaattatttggtaaaaaaacattaggcttagcatattctatcgtcggtgtagatttaattctagcgcctgctacaccaagtaataccgcgcgtgcaggtggaatcatgttcccaattatcaaatcactttctgaatcatttggttcgaaaccgaaagacgaatcatcacgtaaaatgggtgcatttctagttttcacagaattccaaggtaacttaattactgcggctatgtttttaactgcaatggccggtaatccccttgcacaaaatttagcatctagcacatctaatgttcacattacatggatgaattggttcttagctgctttagttcctggacttgtttccttaattgttgtaccttttatcatttataaaatttatccaccaactgttaaagaaacaccaaatgctaaaagttgggctgaaaatgaattagcgactatgggtaaaatcgctttagctgaaaaatttatgattggtatttttgtcattgctctaacactatggattgtcggaagtttcattcatattgatgcaactttaacggcctttattgcgctagcattgttattattgacaggcgtcttaacatggcaagacattttaaacgaaacaggtgcttggaacacattagtatggttctcagtgttagtgttaatggccgaccaattgaacaagcttggatttattccttggttaagtaaatccattgctacaagtcttggtggattaagctggcctatagtactggtcattttaatattgttctacttctattcacattacttatttgcaagttctacagcacatatcagtgctatgtatgcagcattactaggcgttgccatcgcagccggtgcaccaccattattcagtgcattaatgttaggtttctttggtaacctattagcttcaacaacacactatagtagtggtccagcgccgattctcttctcttcaggttacgtgactcaaaaacgttggtggacaatgaacttaatattaggtttcgtctactttattatctggattggtttaggatcactttggatgaaagtaattggtatattttaaaatgtttaaattagggagtgggacagaaatgatattttcgcaaaatttatttcgtcgtcccaccccggcaaggttgactagaattgaaaaaagcttgttacaagcgcattttcgttcagtcaactactgccaatataacatcgtagagcatagaacattgatttatgtcccagcctgtttttaatttgtatttaaaatcaatctttgctaaatcaagactcccctttttaaaatacgtttatcctttaaatcattgcgtacttcactgaaaatttgtataaagatttaagtcattacgtaacatcacataaaatacatttctatattaatccgcttcattgattaacattacttatgtatcataaatcatcaaacaaaaaacactttcgcttaaattcatttaattatgaattcaacgaaagtgctttattttatatttaatttttcaaatttatacggctgtcactattactgcacacatacctcagtctcaccttaacatagcacaaaggaagttgaaaacatgtataattatctctcctcgcattttatagggtttttgcgaccggatgtttcttcaatttaatgtattgagaaagactatataacacaatacctgtccaaataaatataaacgtaattaattgatctatactaaaaggctctttgaaaacaaatatgccgagtacaaacattattgttggtccaacgtattgaataaatcctattagcgaaagtggaatacgttttgccccggctgagaataggattagtggtattgccgtaatagcaccagaaaataataaccaaaatgatgacatgttcaatccaaatgacatctgatgttgctgccataaataaataacgtatatgagtccagcaggtgcggtaacaatacattcaatcgtaatactgctgatggcatcaatatgtactactttttttaataatccgtatgtaccaaaggataacgctaatataatagagacgattgggaattctccaatcttgagcgtcatatataatacaccgatgaatgcgaataaaatggctagccattcaaatttattgaatctttcttttaaaaagataagtgcgagcaaaatgctaacaagtggatttatataataacctaaacttgtttgtagtacgtgaccgttcgttacagcccaaataaatgtaccccaatttaatgtgataacataacccgctacgacaattgctagtaattgaatgggcttggctaacaattgattcatatctcgttgaaatgcattgcgttgtttttgtccaaccgcgagtatgaaaatcatgaatattactgaaaatataatacgaaaggctaaaatttcaaatgcgcctattgcatcaacgaactgccaatatataggtagtattccccacagaatgtaagcactaagtgctaaaaatataccttttttatattctgtattcacttacatacctccttactctcccaaatttttaacatgttacgctcacttagttaagctaatataacgattttactaataatatttcgataaagatatcattttgtttatattttccacatttattcgccaaccactaaacaatattaattttataaataattctgtacaaatcagggtatattgccagaaagactaccaaacaacataaaggatggatacaaatgactttacctaaaattggaaagcctgcaacacgtgcattaaattcacaaggtatatacacattagaagatgtatcacaatatacaaagtcatctctaatggagatgcatggcgttggtcctaaagctatatcaatattggaacaagctttatttcagcaccaactacattttaaaacggaagttcattcatcattaccttttttattaacaggagacgtgccatgcaatcatgcccctaaacgtcaacaaatgatagattttatagttgctacagcagcattagatattgaattattacgttcactggttacaacagaatttatttggtctgtgcctggacactttgacatttatggacctcaaatattaattcaagaactatctaatcattataaagagattgcttcgctcaatattcaatccatcatcacacatggctatttcggttccatgcacggtagtcaaatattaaaaactggtaaagagattcattttgctcatttttttgaatttgaaaatcataaaaaggatgccaagttaagcaaagtgacatcttacattgttgttggttaatgactcaaattatatatcgcaaaaaattcttttgcttttacatgtatatttttatataacaaataattttgcataacatttttgttatatgaacacttattactagagtgcacattgaacatacagtatgattaaatatcatgttatgaaagaaggatatattttgactgtttttaaaaatgagcgcttaagctggttaccatacatagctattgtcattttgttacacgttattgggtttagttttttatggattgctggaaaagaccatcatatcttatttggtatggggattcttgcatatacattaggtttacgtcatgcatttgatgctgatcatatcgccgcgatagataatacggttcgcaaattattacagcaacgcaaagatccatctggtgttggtttctacttttcaattggacattcatctgttgtatttttaatggctgtttttttaggggtatctgtaaaatgggctaaagatgaattaccacatttccaagatattggtggaacgattggtacactagtatcaggtttctttttagtgcttatcggtgtgttgaatctaattattttaatctctttaattaacttgttcgctaaattacgtcgtgaacacattgaagaagctgaagtcgatgcattacttgaatctagaggatttgtttctcgatttgtaggaccttatttcaaattaatcacgcgtagttggcacgtattgccacttggctttttatttggacttggttttgatacagctagtgaaattgcgttactcgctctttcttcaggcgcgtcacaacaggccatttcatttatcggaatcttatctttaccaattttattcgcatcaggtatgagtttgttggatactttagatggtgttgtaatgaaatatgcctataattgggcattcttcaatcctattcgcaaaatctattacaatataacgattactgcgatatccgtcatagctgcattagtgattgggatgattgaattgctgcaaattcttgctgataagctagacttacacggtgcattttgggcatttattagttcaatcgaatttgattatttaggctatattctagtcgctttatttttaattacttggcttatttcgagtttaatttggaagtttggtcgcatagaacacaaatggtctaaataaagtaacttgtcttgcaatcatctttttattattgcgtttttagacaccctgcatactgactcctttagaatacgctctcagtagtcatctttaaatcgtttcttttagagatgacctcattttgagagcgtatttttctatctaaaatagatcttgtaaaatccagtgctttattatttaaaattttagcatttctgtttacaattctcttatagtctttaatacaggaggcgatatactaatgaatattgcaaagttagaagattatctacaaattgaaccaactcgttataatcaaccgagtattgaagcattaaattattatgcgactcgctttatgttaacggtgcctttcgaaaatattgatgttcaaaatggtaaaccaatatctgtagatatcgatgcacttttcaataaaattgttcatgataaacgcggtggtttttgttatgagttaaacacatttttcaaagcatatttacaacaaaaaggatttaacccagaattaatgtcggctaccattcatacacccggtggcggtcgtagtcaaaacggttcacatgcatcacttgttgtttctattaataatgtcttttatgtaaccgatgtcggctttggagacttacctctaaatgccataccgattactttaccagatgatacacagcagatcactgatatcagtgggacattccgcgctattttcaacagtgaggataaggacattttctatgttcaaaaatatgaaaataatcattggcatacaaaatacgaagctgaattcaaggctagagaaatagaagaattcgatcaaaacattgaatataatcaaacacatcctgattcagtatttgtaaaacatttattaattacaatgccacaatcatttggacgtgctacaatgtctgaaaaccatttaactttaacaaaagatggaacgccagaaaagttagctatcacaaaagataactataaacaatttttaacaaaatattttggattaaatgtaacaattagtcgacttgaaaacagcgacaattaatcataaaaatacggacgtaacttactttaatgtaggtaacgtccttttttaatacacatgttcgttaggatgtgggaaaaaatgatacagcgccactaacaattaatgatttagtggttctcacacattagccagagctcgtgtgtacttataaatagacattcatgcgtaaaacgcatgcataaaaaatactaatttctaaagaaaaagtatttctttattgacactctgtgcaaacacaacaaaaaggatatggcacaaacttcatgccacacccttcttttgaaccgcttcattttacttaagcaagtgcatctacaacataaatgacacctacgaatacaaatgcaatagcaatcatcgtcgaaataaagacgatacccattaatggattaaataataaaatgacaccgaaaacaatacctaataaattaaaaatcactgaaattagttttaagctaccactacctgaaaacgtaaataatccagcaatagaactaaaaataaaccaaaatgcaaacatgtagataaaaaatgccgagctagcaccaacattaaaaatgacaataagaccaaatagaatatctacaatccccataaacagaatccaattttggttaccaccaactaaagctttggcttttctacgataaacaatttgaatcacaccattaatcaatacaaataatccaattaaccatgtgattgcataaaagttttcaattgggaatgtaaaaataacaactgctaacattaataacaacacacccataatcaaactagaccatttaattccttgatttcctttttccataacaatcatttcctttcaaacaacgccttctttatattttaattagtgtcactattattcattgtttaaattccctcatcttaacttatagaaacatttcctcagtgcaaatactgtgatgctcaaattagttgaactgctttccaataatccaaattcacccgagaaaatcacgatatattaatatctttcaactatgtaagattcaaacattgaattgtaagtttagataaaggctactgttctacttattatttaaaatgaatttaaatacaaaaggagtgatactatgacgatattatcagtgcaacatgtttcaaaaacatacggtaaaaagcacacatttcaagcacttaaagatattaactttgacatacaaaaaggcgaattcgttgcgattatggggccttctggatcaggtaagacaaccttattaaatgtactaagttcaattgaccaaatttctagcggtagcgtgattgctaacggacaagagcttaataaacttaatcaaaaagcacttgccaaattccgtaaagaatcattaggtttcatcttccaagattacagtattctgccgacattaactgttaaagaaaacattatgttacctttatctgttcaaaaaatgtcgaaagcaacaatggaagaaaattataaagcaatcacaacagcattaggtatttatgacctaggaaataaataccctagcgaattatctggtggtcaacaacaaagaactgcagcagcgagagcatttgttcacaaaccacaaatcatatttgcagatgagccaacaggcgcactcgactcgaaaagtgcaaatgatttattacaacgtttggaagaaatgaataaatcgtttgataccacaattgtcatggttacacatgatccggttgcagcaagttttgcagaacgtgtcatcatgctaaaagatggccaaattcatacacaactttatcaggaaggacgttctaaacaggccttttatgaagacattgtacatcttcaatcagtattaggtggtgtctcaaatgacatttaaccatatcgttttaaaaaacttacgtcaaaacttaaaacattatgcaatgtatttattttcattattttttagcatcgtcttatatttcagttttacaaccttacagtttactaaaggtgtaaataatgacgactcgatggctatcattaagaaaggtgctttagtcggatcaatatttttatttatcattattgtcatctttttaatgtatgccaatcatttattcgtgaaacgtcgtacacgtgaatttgcgctatttcagttgattggtttaacacgacaaaacattttgaaaatgttagcacttgaacaaatgattgtatttataatcacaggtgttgtcggtgtattatgtggcattgcaggtgcacaattattgctttccattgtatctaaattgatgtcattatcgattaacttatcgatacatttcgaacctatggcccttgttttaactattttaatgctaattattgcgtatatactgattttatttcaaagcagtttatttttaaaaagacgcagtatcttatcaatgatgaaagactcagttaagactgatgttacaactgcgaaagttacagttatagaagtcatttcaggcgtattaggtattgctatgattgcactaggatattatatggcgacagaaatgtttggtacgttcaaagcactaactatggctatgacatcaccgtttatcattttatttttaacggttgtaggtgcctatttattcttcagaagttccgtgtcactaatttttaaaactttgaaaaaatctaaaaatggacgcgtatctattacagatgttgtatttacatcttctattatgtacagaatgaagaaaaatgccatgtctttaactatcattgcaattatttctgcagttacagtaactgtattgtgtttcgcagcattatctaaatcaaataccgatcaaacccttacatctatggcacccaatgattttaacgtggtcgcctctcaagatgcgcaacaatttgaatctaaactaagccaacaacatattacattttctaaaaattattatgaaactattactgtagataatgttaaagatcaggttattactttggaaaatggtagtgattcaggtcgcacgaattctattttaagtgcaaatacaaagttaactggtaacaatgccatcattacaaatacaaaatcacttcctaacgtgattaatattcatttaaacaatgatttagtagtaaaaggtacaaagaacgagacttttcgtgttacacaagaagacaaagacaaggtttatcctttaaatctaagctttaattcacctgtcattgaagtaagtccagaaaagtatcagcaattgaaaacacaaaataacgttcatactttttatggatatgatattaaacaaacatcacaaaagaaaaaagctcaagcaattgcaaaacagtttggagacaaaatcatcacttatgatgacatgaaaaaagaggtcgatgctactaacggtattctaatattcgttacttcatttttaggattagcatttttagtagcagctggatgtattatttatattaaacaaatggatgaaactgaggatgaactaagtaacttcagaatattaaaacgcataggctttacgcacacagatatgcttaaaggattattactaaaaattactttcaacttcggtttaccattattgattgctatattacatgcagtattcgccgcaatagcatttatgaaattgatgggtaatatatccttcatgccggttattatagtaatcattgtatacacactcatttacattgtttttgctttaatcgcttttgtacattcaaataaattgattaagaaaaccatttaacacttgtgattaaaagatgattcattgagattttgattttaagcaatgcagtataactattaactgatttataaaaaggagagattgaatcatgaaatttagagaattagtaaaacaatcatacgaggatttaaaaaacttgactgtaacttggtataacgttattgctttagcaattattgttattgtcttaagcaccgttacaacaccaattataggtattccagctggtttattaggtggcgcttattatttaaaacgccgcgaagaaaaaggtaaataagccttctgtgctaaactcaatatgtatttcctaccaaagaaaacataaggagttagtacagaatggcctatacacaccttaacacggatgaacttacgttcatagactcatattatcactagaatctttcagttaaagagatttcgagtagattgaaacgttctagacagacaatttataacgtaatcaatgcttttaagtcgggtatgtctgcccttgaatattatcaagaatacaaacaaagaaagtctaattgtgggagacatagaatagtgcttccagaagaacagtcagattatatccgagagaacgtagctgatggatagacacctgatactattattggcagaggtgaacacacgatcaattgttctgttaaaacactttacagaatgtttaaagagaacatttttgctgtacatgatttacctatgaaatgtaaaagaaagccaaatggccattctgaaaaaagaggtggatagacttttaaaagacatatttctgaaagaatagaagagttccctttattcaataaggagtttggacatctcgaaggagatactattgttggtcgtcatggtagtgcaatcattactttggtagaaagagtatccaagatgattatcaccttacgatccttaggtcgtaaggcaactgatatagaaaatgctctgaactcaatgttttctgctttaccttctcatatatttaaatcaattacttttgattgtggtaaggagttctcaaactggaaaacaatatgtaactgtcacgatatatctatattttttgctgatccaagcatgccagcacagcgaggtttaaatgaacattctaacggaatacttagacgcagtggattagataaggaactggatttcaatttagtaacggatgatcatatcatcagtgttgctcaaaaaatcaatcatcgtcctagaaaatctttaggttatagaacaccattggaagtatttatgagtttcatcaaagatgataaactgtccagcttaatttgacaatctaaagatttataaaaaagccgttggtctcttcgaaactacggcttttctctgtgctataaaatcagtatggcgaagcacagtgatcattgaattctgactttatataaccaagagtatctttggatacactgatgatatctataacagcattgctaatgtagaatatattttcttgattatagaatacaataaatggctccactaaaccttttttaatatataaagaataatcaattaagtctttgttttttatatttttaatagttgcaataacatacttctcatcggcagaatggatttcttcgtaccagttagtaatattaaaaaaacgaccaattcttgttttttctctaaatttaacaggatataagtattcagacaaaaatgtacatttcgtctttgattggttattaaatataacattaataatattagaaatttgctttttattgagaacatcaatatctaagcgtatcctatttttctcaggtgattgaaaatagggaatttcatgttctaaatcaaaatgtatttgttgtgtttcaaggttaataatcattttaatctccaattctttttaggttagcatcgtatgtaccacttcttgttttcttgctacctaaattcttaatactgcttgcacctttccatgctcctcctcggtgtccatctttatcgacagatatatattgaggacgccctttactatttttcttgaacacttttttgccatgggatacatgctttgtagcagaataacccaattttttagctgcctgcgcggcaacttgagggcttgtacgaatcattgatgttacaactgtcttaccatatttttgaatagctttcttaagtccttgtttggcgatgaatcctactaatacagccactacaggtgcaattgaagctttaacctcattcgtatcatatattattttttctcccgtatcttggtcggtaaattctgccttaaagtcattttcattaacaatccttaaaaatttaacatcataagttttatcaagtttattattataattatcttttaatgaagcatctacagtaattttatctgtatttaggtcgtgttctaaactgctttcaatgtttaaatctttagatttaaagttattgtcaatgtaattacgattatttttactgtaaatattctcgttaattttatttgtgtttattttactattcgaattgttaatattagcttcttttataaccacagaagcttctgcaaagtttccgtaagtaaaagttataataattgctagaaataggataattatcttgtttttcatgttttctcctttgatgcgttattttattggatattcttttaaaatatgtggtaagtcatttcggaattcaagattatttgtcagataagcagtgaaataggcggctgcaaaagatgttccatttacagtaagtaactcatcttttgatccttttgtatatacgtctacgccaggagctttaaaatcgatttttttagtaggtgcatatataaatggcttattgtttttgtctattgctgtgatagaatatacttcgttaaaacgtgctggatagtcactataatcatccatgttattccctgctgcggctactaagataatacctttatttttagcgttctttatagcatcatgtaattctttattgtaacgctgaaagccaaaactcatatgaataatatttacgtcatttttgatactccaagttatgccttttattatgttgtctatatcgcctttaaggttatcatctaatactttaacgtcataaatacttactgatttactgataccaatcaacttttctttatgttctccatatgtgataatacttgctacttgagtggcgtgattactatctgtagttatttgattatgattgtttatagcattgtatctttttgtaacaaaattattgtttattcttgtattattaatacccgtatctaaaatagcaacttttacattggatggctttgaatcatttatacatatatttagactgctccatgcccaattatttggttgatttaataaataaaacgagaaagaaattataaatatagcgacccctatggataaatgtattaaattacgactcatatgacacctataatttttagttaactctttctgcaataagactgtttagaaagataaaaactcattaacttgaatttatacatatatatgtatattatttatattttcttatattcaccaatttgtcaatatttttttgataaattaacagatatatattttgtagagctctataagatatacaacgtcaatcattttacaaaagataaaaatggtatcagtatttagaccgatatatcaatataattgataaattttcaaatgcttataaacccctttaaatcaacgtttctaaggtttttaaaaatctttttaaatttattttcaaaaaacactgtacattatgccaatatgagcgtatagttggacttacgtaataaaagctcgtgaattaaattgtagtgtatttgtttagaatatcctcttttttagttatgaatttgttacaaatattaagtgcaaaagcacacggaggttttctatatgaataacggtacagtaaaatggtttaacgcagaaaaaggttttggtttcatcgaacaagaaaatggcggagacgtattcgtacatttctcaggtatcgctagcgatggctacaaaactttagaagaaggtcaaaaagttactttcgaaatcactgaaggtcaacgtggagaccaagcagttaacgtacaaactgtttaatcttacaaaataaaacgactcattataaatgaatcgctttgattaccaacaaggttctaaatcttgttggtatttttttatgctattttagataatataaataatatgaggccataccacgatgatttataaaaacttatttgccagatgcatactaatcaaagctataagaatgattgcaccaacaaatgctatgaaagaaagtacacctgtttttatatttctagctttagtcgtttgtacttcactaggatcttttccattcataaaagcaacaattcgatcgtagttatccattttatgcacttttttaaagtcttctattttcatagatgcataataacctattccataaatgactatcaccgttataccccaagcccaattccaataaacaactaaaggtcctgttaaaattgcagctagtgtcatgaaaataagcatcacatatgtccataagttaagacttcgttgcgctttaatatcaggtgcaaatggaatggtcccttttactaaatcatctaaagttacattgaacaaatcacacatcattaataagttatgtatgtctggtaagcttttgtcattttcccaattagaaatactctgcctagatacatataacttttcagcaagatattcttgtgaataaccatctcgttcccgatactttttaatttgtttactcagattcaattacatacgcctccattcaattagtacaatcattacaatcagactatcagataaagttaaatcaagtcacctatatgattgactaaatgttttgacatactacaacatcagggttcgaagactcccttaagacagacctgtatgattacgcgcttgtaattttctcaatgccaacttatttattaatgatgcaacttttccatgctattcaatgcttgcgaagttagtcctatttaagagattacgttcacactatttactattcgattttccagctttccaactatgcttttctaatcttttttgtgctataaattctaccgcttcaaaaatacatactgcactgatgaaccagcttaggaaaccaacaataatgctaatcaaccacatgtgcgtcatatgtaacatcatccatgtaactaaaatacaaactaatacccctgtcataccaaacactgcgccacgacttacatgcacagcgactttatcaccatattgcatacctgtaataaacatagacactaaaaatactgccggaaacgttgcaaatataccgccaaattctttccaaggtagtgttacagatacaatataacttaataatactgcaaatccccccacaaaaaatttcattaatgttaatttcatgatgttctgcctccaataatttattacttaataactgaatacaactaattatcacgcattttccaaactataaatgtctaatactgaatattgcgagggaaataacaaaccaacaaacaactgtgaatattgcgcctttccgataacctttatgcttaatatagagagatgtcaaaaatacagttaatatacaagacagaataccgacaattgctccagtactaagattcatcgacatctccactaattgcgtaccacgatgatccaaagctaatgcgataatagccgcaagaaagactgccggcatagtagctataatacctcctaacttaccacctaccttatcagcaataattgaagctaatgcaacagcgataccaccaatgacaaaatgaagaattgcacttccaattgaaaacatcttcaacgtacctttctataattaattcaatacaaaacgtatcattcacacaaagtgtaaaacttaaattttctactgtaaaggcaactcaagcgatgttcataaagctttcatgatactttcataaactagcaataaagggttcaaataaaggtatatccagctcaaattagggagtgggacagaaatgatattttcgcaaaatttatttcgtcgtcccaccccaactcgcattgcctgtagaatttcatttcgaaattctctgtgttgggacccacaccctaactcgcattgcctgtagaatttcttttcgaaattctctgtgttggggcccctgactttaattgaaaaaagcttgttacaagcgcattttcgttcagtcaactaccgccaatataacttcgtagagcatagaacattgatttatgtcccagcctgatcaacatataaatataaatttttatgtttcacgtaaaacaaaaaaagacaaagctgtaatgatcttagctttgtcttttatgtgttagtcatcatgtatacgacatcctactactaacgtttatatattcgaatttttatttcataataatcttcatgatctttgtctttatgctcaacatgtaatcctgtttgttgaatcgcttggatacttttgcctacctcatctcgtgcttgcgtgacatcttgttcaaagcgaaggttttgtgctttgactttttcgggcccagttttttggcgtactctatcttcagtctgtttcacatttagtttttgtgcaatgacttgctcaatcaacgcttcttgttcgctatcagacaatgataataccgctctcgcatggcgttcagtaattttaccttctcttaagcgaagtagtactttcggcgccaacttcaataaacgcaacttatttgcaataaagctttgacttttacctaaactttttgccaattcactttgcgttgtatcaccaatttccaataatttcttataggcttccgcttcttcaacaacagacaaattttctctttgaatattctcaattaatgccacaacagccgtctcttcatcatccatatcacgaataataacgtctgcttgaggtaaatttagtgattgtattgctctaaatcggcgctctccagcaataatttcaaacatatcttcttcaatcggtcttacaacaataggctgtaataaaccatgttcatgtattgattcagcaagttctttaattttatttggttcaaatacctgtcttggttgataacggttgggaacgatacgttcaatttgaatggattcaacattactattgcgattttcttcaatatgtccaatgatgtcatctttgtttttcaaaccaaataattttgaaaaaggttttttcattatccattcgctccttttatgttagttgtaaaggattatgcattatttttcaagtaaaggagtcttattaggcgtccctggttttcttggatactttttcggcgtctgtctttttttatcaataatgaacatctggcgctctccagcatcttctggcaattcaaaggtatgtgtttctgtaacgttaccacctaacacactaattgcaaattttgcttcttctaattcttcttcaccttttgaagattttaatgcaacaaactgtccaccttttttaactagcggtaaacacaattcactcaacacggataatctagctactgctcttgcagtaacaacatcataagactccctgtagacacccttaccaaatgtttctgctctatcgtgtataaagctgacatcctgtaattgtaattctgacgctaaatagtttaaaaattgaatacgcttatttaatgaatcaacaatcgtcacttttaactgcggaaacattatttttaacggaatacttggaaaaccagctccagcgcctacatcacatatacttataggctgattaaaatcaaaataaaaactaggtgcaatggaatcataaaaatgtttcaaatatacatcgtgttcatctgtaatacttgtcaaattcatcttttcattccattcaacaagtaaacgataatatgtttgaaactgttgtttttgagtctcagttaattcaatattatgttcttttaattgttctgctaaccattctacagtcattagtcactcaccctttggagtttaccttgttctaagtaaatcaataatatagatatgtctgctggatttacccctgatattctagaagcttgtgcaatatttaaaggttttacttctgataatttttctcgcgcttcagtcgccaaactatcaatcttactataatctaagtcttctggaattttcttctcttccatacgtttaactttctcaacttgttgtagtgatttattgatataaccttcatattttgtttgtatttctacttgttcttcaacatctgcattcaattgatgttcttcttctaaaatttctaaaattatatcgtaagtcatttcaggtctgcgtaataaatcgatagctaaaataccatcttttaagcgagaaccaccatgttgttcaataatcacttgcgtatgttcgtttggtttaatacgaatatctgataaacgcttaatttccgcatcaatttgctgacgtttttcattaaaacgtgcatatcgttcttcagaaatcataccaagttcatatcccatatccgtcaatctcaaatcagcattatcatgacgtagtaacaaacgatattctgcacgtgatgttagtaaacgataaggttcattagtacctttagttacaagatcatcgattaatacacctatatatgcatctgaacgacttaatatcttttcgcctgtgtttaacactttacctgcagcgttaatacctgccatcaatccttgtcctgctgcttcttcataaccagatgtaccattaatttgacctgcagtgtataggtttttaatcattttcgtttcaagtgtaggccataactgcgttggcacaatcgcatcatattcaattgcgtagccggcacgcatcatatctgctttttcaagacctggtatcgtctctaacatttgacgttgcacatgttcaggaagacttgtagacaatccttgcacatatacttcatttgtattacgaccttcaggctctaagaaaagttgatgtcgcggcttatcattaaatcgaacaaatttatcttcaattgaagggcaataacgtggcccggttcctttaatcatccctgaatacattgcagatagatgtaaattatcatcgataactttgtgtgtttcagcattagtatacgttagccaacatggcaattgatctaatatatattctgttgtttcaaagctgaatgcacgacccacatcgtcacctggttgtatttcagtcttcgaatagtcaattgtttttgaatttacacgcggtggtgtacctgttttaaaacgaacaatatcaaaaccaagttctcttaaattgtctgataatgtgattgatggtaattggtgatttggtccacttgaatacttcatattacctaaaatgatttcaccacgtaaaaatgttcccgttgtaataattactgctttagataaatactctgtaccaatatttgtacgtacacctttaacttcattatcttctataataagttcgtctaccataccttgcattatatgcaaattttcttcatcttcaatcacgcgtttcatttcttgttgataaagtactttatctgcttgcgctcttagtgctcttacagcaggtcctttaccagtatttaacattctcatttgaatgtgtgttttatcgattgtttttgccatttgtccacctaaagcatcaatttcacgaacaacgatacctttagctggtccacctacagatgggttacatggcataaatgcaatattatctaaatttattgttagcattaatgttttagcaccacgtcttgcagatgctaaacctgcttctacacctgcatgtcccgcacctataacgattacatcatattcttgaaccacaatataaacctccttatttgatatcttactagccttcttaagacggtattccgtctatttcaattactatttacctaagcagaattgactgaataactgatcgatgagttcatcacttgcagtctcaccaataatttctcctaatatttcccaagttctagttaaatcgatttgtaccatatccataggcacaccagattctgctgcatcaatcgcatcttgtatcgtttgtcttgcttgttttaataatgaaatatgtcttgaattagaaacataagtcatatcttgattttgtacttctccaccaaagaacaaatctcgaatttgtatttctaattcatcaataccttcttgttttaacattgaagtttgaattaatggcgtatcgcctatcatatctttaacttcattaatatctatattttgctctaaatccattttattaacaattacgattacatcttcatttttaaccacttcatataatgtgtaatcttcttgagtcaatgcttcgttattgtttaatacaaataaaattaagtccgcttggctaagagcctttctagagcgttcaacaccaatcttctctactatatcttctgtctcacgtataccagcagtatcaactaatcttaatggcacgccacgaacattgacgtactcttctaagacatctctagtcgtacctgctacctcagttacaatcgctttattatcttgtattaaattatttaacatcgatgatttacctacatttggtttaccaacaataactgtagataaaccttcacgcataattttaccctgcgcaccggtatctaataaacgattaatttcctgtttgatttctttagactgctctaaaagaaattcagtagtcgcatcttcaacatcatcgtattcaggataatcaatattcacttccacttgagcgagtatctctaatatagattgacgttgttttttgattaagtcacttagacgaccttcaatttgattcatcgcaactttagaagctctatctgttttcgagcgaataaagtccataactgcctcagcttgagataaatcaatacgaccatttaaaaaggcacgttttgtaaattcacctggttcagccattctagcgccatatgtcatagtaagttccagcactctattaatcgttaaaataccaccatgacaattaatttctataatatcttcgcgtgtaaatgtttttggtgctcttaacacagacaccataacttcttcaaccacttctttagactctggatcaataatatgaccgtaattaatcgtatgtgatggaacatcatttaaaagatgttttcctttatataatttgtcagcaatttcaacggcttgcggtccagacaatcgaacaattccaattgccccttcacccattggtgttgaaatactcgtaattgtatctaaatccatattgctactcgcctccttcaacgatgtgaatacattttaaagtaaattattataactctaaggtaagtcttacgtttgtctgaggtaagactccggggtgtgttgagtggttaatgttttcctctctttcccctaccctatccttacttaatctttttattaaaaactttggcaattttaagtacgtgctcaagactattctgtatttgtaaagtggtcatatctttagctggctgtcttgctattacaataatatctttggccaatatatgcgacttatgtactttgaaattttcacgtattgctcttttaatcttgtttcttaacactgcattacctagttttttagaaacactaatacctaagcgaaaatggtctatttctttattattacaagtgtatacaacaaattgtctgttggctacagaatgaccttttttatatattctctgaaaatctgcattctttttaattcggtaagctttttccaataacatcactcgcttatttatcgtttttatttgaagctatatttaaacttctattgagcttataacataaatttctatttattcttaatttaaacgaaaaaaaagatcactgatgagtcagtgatcttatgcagataaaactttacggcctttacgacgacggcgcgctaaaactttacggccattttttgtgctcatgcgttttctgaaaccatgaactttactatgtttacgtttatttggttgataagtacgttttaccatgcaaaacacctccatctttatacagttatctaatataccagattatgcagactctgatcactttaatagataagattttgcgtttcttagattaaaattctcgtattagctcattgattatctagtcataattcaagcaactactacaatataacaaaatcctttttataacgcaagttcattttat
